(19) United States
(12) Patent Application Publication
(10) Pub. No.: US 2020/0236971 A1
(43) Pub. Date: Jul. 30, 2020

(54) COMPOSITIONS AND METHODS FOR PRODUCING RECOMBINANT ANIMAL PROTEINS IN PROKARYOTIC ORGANISMS FOR USE IN FOOD AND FEED

(71) Applicant: Bond Pet Foods, Inc., Nederland, CO (US)

(72) Inventors: Karin Pernilla Turner Audibert, Golden, CO (US); Richard W. Kelleman, III, Nederland, CO (US); Anthony George Day, San Francisco, CA (US); Julie Marie Struble, Bothell, WA (US); Ryan Michael Yamka, Trumbull, CT (US); Catherine Asleson Dundon, Englewood, CO (US)

(21) Appl. No.: 16/775,864

(22) Filed: Jan. 29, 2020

Related U.S. Application Data
(60) Provisional application No. 62/798,449, filed on Jan. 29, 2019.

(51) Int. Cl. A23K 20/147; C07K 14/435; A23K 10/20; A23K 50/40; A23L 33/17; A23J 1/02

(52) U.S. Cl. CPC A23K 20/147; C07K 14/435; A23K 10/20; A23V 2002/00; A23L 33/17; A23J 1/02; A23K 50/40

(57) ABSTRACT

The invention relates to methods and compositions for the recombinant production of animal protein for use in animal food, particularly pet food.

### CROSS REFERENCE TO RELATED APPLICATIONS

[0001] This application claims priority under 35 U.S.C. § 119(e) to U.S. Provisional Patent Application No. 62/798,449, filed on Jan. 29, 2019, which is incorporated by reference in its entirety.

### SEQUENCE LISTING

[0002] The instant application contains a Sequence Listing which has been submitted electronically in ASCII format and is hereby incorporated by reference in its entirety. Said ASCII copy, created on Feb. 7, 2020, is named 45460US_CRF_sequencelisting.txt and is 1,704,433 bytes in size.

### BACKGROUND OF THE INVENTION

### Field of the Invention

[0003] The invention relates to methods and compositions for the recombinant production of animal proteins, and also relates to the use of recombinantly produced animal protein in animal food.

### Description of the Related Art

[0004] Pets need essential amino acids in the form of protein and these amino acids are often provided by meat from different animals, most often domesticated animals like chicken, cows, and pigs. Another common protein source is fish. Animal meat also contains other nutrients like vitamins, minerals, and fatty acids that are important for the health of pets. The use of meat for feeding pets presents some problems. For instance, animal agriculture is a climate change driver releasing 14.5% of anthropogenic greenhouse gases globally [10]. It also causes biodiversity loss; only 15 mammals and bird species make up over 90% of the livestock production and 60% of mammals are made up by domesticated livestock (on a weight basis), mainly cows and pig, whereas humans account for 36% and wild mammals only 4% [11]. The biomass of poultry is about three times higher than that of wild birds [11]. Populations of vertebrate animals, such as mammals, birds, and fish, have declined by 58% between 1970 and 2012 [12]. Meat also frequently contains pathogens like Salmonella, Shigella, Listeria monocytogenes, Escherichia coli, and Staphylococcus aureus. These pose a risk to both the companion animal and the pet parent [13]. Antibiotic resistance is an immeasurable challenge for humanity and animal agriculture is one of the contributors to the trend [14]. Numerous studies have demonstrated a link between antibiotic use in livestock and increased prevalence of antibiotic-resistant organisms associated with those animals [15] [16]. Of all antibiotics sold in the United States, approximately 80% are sold for use in animal agriculture; about 70% of these are from classes important to human medicine [17].

[0005] Although plant sources, e.g., different types of legumes, contain a fair amount of protein, they also contain anti-nutritional factors like fiber, phytate, and protease inhibitors, that limit digestion and absorption [1] [2]. Soybean, a commonly used protein source, decreases the digestibility in canine foods when present in concentrations over 15% [3]. Many plant sources also lack in one or more essential amino acids [4] and thus vegetarian pet foods often contain an inadequate concentration of essential amino acids [5]. In fact, tryptophan and lysine are scarce in corn, lysine in wheat and other cereals, and methionine in soybeans and other legumes [6]. Numerous studies have shown that vegetarian commercial diets for cats and dogs are frequently nutritionally inadequate [7], [8]. Some commercial legume-rich diets may lead to diluted cardiomyopathy in dogs [9]. For all the forgoing reasons, a need exists for improved food for animals that require protein in their diet.

### SUMMARY OF THE INVENTION

[0006] Disclosed herein are improved methods and compositions for manufacturing food for animals, particularly companion animals. In certain embodiments, the methods entail producing animal proteins recombinantly in a microbial host, as described herein. The recombinant proteins produced by the method can provide equivalent or better nutrition than conventionally harvested animal proteins or plant-derived proteins, without the associated problems described above. In certain embodiments, the recombinant animal proteins described herein can be incorporated into or serve as food for humans, wild animals and/or zoo animals. In preferred embodiments, the food composition is substantially free of antibiotics, animal growth hormones, and/or meat from farmed, caught or slaughtered animals.

[0007] One or a plurality of recombinant proteins can be produced in one organism, or one strain, thereby allowing the amino acid profile to be tailored to the particular nutritional needs of targeted pets and other animals, including humans. Alternatively, a single recombinant animal protein can be produced in one strain (or organism) and mixed with a protein or proteins produced in a different strain (or organism) to yield a final product with the desired proportions of amino acids and other nutrients. Thus, the amino acid profile (and/or the profile of other nutrients) can be customized for the targeted animal, including pets and humans.

### DETAILED DESCRIPTION OF THE INVENTION

### Definitions

[0008] Terms used in the claims and specification are defined as set forth below unless otherwise specified.

[0009] The term “ameliorating” refers to any therapeutically beneficial result in the treatment of a disease state, e.g., a nutritional deficiency disease state, including prophylaxis, lessening in the severity or progression, remission, or cure thereof.

[0010] The term “in situ” refers to processes that occur in a living cell growing separate from a living organism, e.g., growing in tissue culture.

[0011] The term “in vivo” refers to processes that occur in a living organism.

[0012] The term “mammal” as used herein includes both humans and non-humans and includes but is not limited to humans, non-human primates, canines, felines, murines, bovines, equines, and porcines.

[0013] The term percent “identity,” in the context of two or more nucleic acid or polypeptide sequences, refers to two or more sequences or subsequences having a specified percentage of nucleotides or amino acid residues that are identical, when compared and aligned for maximum correspondence, as measured using one of the sequence comparison algorithms described below (e.g., BLASTP and BLASTN or other algorithms available to persons of skill) or by visual inspection. Depending on the application, the percent “identity” can exist over a region of the sequence being compared, e.g., over a functional domain, or, alternatively, exist over the full length of the two sequences to be compared.

[0014] For sequence comparison, typically one sequence acts as a reference sequence to which test sequences are compared. When using a sequence comparison algorithm, test and reference sequences are input into a computer-based program, sub-sequence coordinates are designated, if necessary, and sequence comparison program parameters are designated. The sequence comparison algorithm then calculates the percent sequence identity for the test sequence(s) relative to the reference sequence, based on the designated program parameters.

[0015] Optimal alignment of sequences for comparison can be conducted, e.g., by the local homology algorithm of Smith & Waterman, Adv. Appl. Math. 2:482 (1981), by the homology alignment algorithm of Needleman & Wunsch, J. Mol. Biol. 48:443 (1970), by the search for similarity method of Pearson & Lipman, Proc. Nat'l. Acad. Sci. USA 85:2444 (1988), by computerized implementations of these algorithms (GAP, BESTFIT, FASTA, and TFASTA in the Wisconsin Genetics Software Package, Genetics Computer Group, 575 Science Dr., Madison, Wis.), or by visual inspection (see generally Ausubel et al., infra).

[0016] One example of an algorithm that is suitable for determining percent sequence identity and sequence similarity is the BLAST algorithm, which is described in Altschul et al., J. Mol. Biol. 215:403-410 (1990). Software for performing BLAST analyses is publicly available through the National Center for Biotechnology Information (www.ncbi.nlm.nih.gov/).

[0017] The term “sufficient amount” means an amount sufficient to produce a desired effect, e.g., an amount sufficient to modulate protein aggregation in a cell.

[0018] The term “therapeutically effective amount” is an amount that is effective to ameliorate a symptom of a disease. A therapeutically effective amount can be a “prophylactically effective amount” as prophylaxis can be considered therapy.

[0019] It must be noted that, as used in the specification and the appended claims, the singular forms “a,” “an” and “the” include plural referents unless the context clearly dictates otherwise.

### COMPOSITIONS OF THE INVENTION

[0020] Proteins

[0021] The recombinant proteins produced are animal proteins, e.g., proteins from any organ of an animal, including, but not limited to proteins expressed in the brain, skin, scales, feathers, eyes, shells, hair, horns, ears, liver, heart, kidney, stomach, intestines, and muscle tissue. In certain embodiments, the recombinant proteins are animal muscle proteins. In related embodiments, the animal protein is an animal cytoskeletal protein. In other related embodiments, the animal protein is an animal myosin protein or an animal actin protein.

[0022] The animal muscle proteins include those proteins normally found in animal muscle tissue (or relatives of those proteins). In addition to myosin and actin, these proteins include troponin, tropomyosin, actinin, titin, connectin, skeletal receptor, myosin-binding protein, desmin, leiomodin, tubulin, myotubularin, myozenin, telethonin, calsarcin, myotilin, nebulin, nebulin-related anchoring protein, myomesin, vinculin, paxillin, beta-enolase, myotubularin, calponin, caldesmon, transgelin, tropomodulin, supervillin, gelsolin, twinfilin, profilin, caveolin, catenin, cofilin, capping protein, leiomodin, tensin, M-protein, radixin, filamin, keratin, myopalladin, calsequestrin, caveolae-associated protein, nebulette, coronin, talin, dystrophin, dystroglycan, integrin, ankyrin, syncoilin, smoothelin-like-1, spectrin, synemin, paranemin, ponsin, plectin, skelemin, sarcoglycan, LIM protein, myoblast determination protein, myocyte-specific enhancer, and myocilin.

[0023] The recombinant animal proteins may be full-length proteins, truncated proteins, or fragments of proteins. The sequences of the recombinantly expressed proteins may be modified by replacing one or more amino acids with a different amino acid (e.g., by changing the nucleotide sequence of the recombinant gene encoding the protein). The modifications may improve the yield of protein produced by the organism that has been engineered to express the protein, e.g., by improving the efficiency of transcription and/or translation of the protein, by improving the stability of the protein, by altering the rate at which the protein is secreted by the organism, or by changing the activity of the protein so any deleterious effects of expression of the protein on the recombinant host cell are minimized.

[0024] Protein Origin

[0025] The origin of the recombinantly expressed protein sequence (i.e., the species of animal from which the sequence to be recombinantly expressed is found in nature) can be any species within the biological kingdom of Animalia. Preferably, the origin is a vertebrate animal, which can be a fish, bird, mammal, amphibian, or reptile. The origin may be a placental mammal, monotreme mammal, or marsupial mammal (metatheria). The origin may furthermore be a bird or another vertebrate from the reptile Glade.

[0026] In some embodiments the gene origin is a placental mammal, including but not limited to carnivores (including lion, bear, weasel, seal, wolf, coyote, fox), equidae (including horse and donkey), even-toed ungulates (including pig, camel, cattle, and deer), Afrotheria (including elephants, golden moles, and manatees), and Boreoeutheria (including primates, rabbits, hares, pikas, rodents, moles, whales, bats, dogs, cats, seals, hoofed mammals). In some embodiments the origin is a monotreme mammal, including but not limited to platypus and echidna. In some embodiments the origin is a marsupial mammal, including but not limited to koala, possums, tapirs, kangaroos, wallabies, and marsupial lions. In some embodiments the origin is a hoofed mammal, including but not limited to cattle, antelope, deer, reindeer, elk, sheep, goat, camels, carabao, yak, bison, buffalo, caribou, water buffalo, pig, horse, and donkey. In some embodiments the origin is an endothermic vertebrate, classified as Ayes, including but not limited to chicken, turkey, duck, pigeon, penguin, ostrich, goose, pheasant, and quail. In some embodiments the gene origin is a reptile, including but not limited to alligators and crocodiles. In some embodiments the gene origin is an aquatic animal, including but not limited to shark, tuna, trout, salmon, jacks, carp, catfish, cod, flounder, bass, tilapia, sturgeon, crab, lobster, shrimp, prawns, oysters, mussels, eels, shellfish, cuttlefish, starfish, crayfish, and jellyfish. In some embodiments the gene origin is an amphibian, including but not limited to frogs, salamanders, and toads. In some embodiments, the gene origin is an insect.

[0027] Truncated/Mutated Proteins

[0028] It is well known that expression of mammalian and avian cytoskeletal proteins, such as actin and tubulin, in microbial hosts can be toxic to those hosts, thus limiting expression levels. This is due to the biological activity of these proteins interfering with the metabolism of the host cell. The nutritional properties of these animal derived proteins will remain essentially unchanged regardless of the biological activity of the protein. Expression levels of toxic recombinant animal proteins can be increased by decreasing their host toxicity via targeted mutagenesis (to decrease the biological activity responsible for the protein's toxicity, for example). Examples are provided herein for improving expression of actin, but these examples should not be construed as limiting. Similar methodology can be used for other proteins.

[0029] Preferred protein sequences are listed in Table 1, below. They are grouped according to the tissue in which they are highly expressed (when known). If it is not known in what tissue a protein is expressed, the protein is grouped according to the tissue for which its expression is required (e.g., for normal development of the tissue). For example, it is known that myotubularin is required for normal skeletal muscle growth. Thus, it is grouped with the skeletal muscle proteins. In certain embodiments, the food compositions described herein comprise one or more of the recombinantly produced proteins set forth in Table 1. In related embodiments, the food compositions described herein additionally, or alternatively, comprise one more recombinantly expressed homologs of the recombinantly produced proteins set forth in Table 1. In other related embodiments, the food compositions described herein comprise one more recombinantly expressed proteins that are at least 50%, 60%, 70%, 80%, 85%, 90%, or 95% identical, but less than 100% identical, to the proteins set forth in Table 1 (i.e., the protein sequences are modified to alter their amino acid content, e.g., to improve nutrition, to improve digestibility, to optimize expression or to optimize secretion). In other related embodiments, the food compositions described herein comprise one or more of the recombinantly expressed skeletal muscle tissue proteins of Table 1, or one or more of the recombinantly expressed cardiac muscle tissue proteins of Table 1, or one or more of the recombinantly expressed smooth muscle tissue proteins of Table 1, or one or more of the skeletal/cardiac muscle tissue proteins of Table 1, or one or more of the skeletal/smooth muscle tissue proteins of Table 1, or one or more of the cardiac/smooth muscle tissue proteins of Table 1, or one or more of the skeletal/cardiac/smooth muscle tissue proteins of Table 1. In yet other related embodiments, the food compositions described herein comprise proteins from two or more of the above-mentioned categories of proteins described in Table 1.

[0030] Recombinant Genes Encoding Animal Proteins

[0031] Genes encoding recombinant animal proteins can be isolated by taking a sample from an animal and extracting nucleic acids, such as mRNA, from that sample and then amplifying the gene by reverse transcription followed by PCR. The cell sample could be a tissue sample, blood sample, mucus, skin, saliva, or hair. Another option is to have the gene synthesized on demand by a company which performs such work.

[0032] The gene sequences (DNA/nucleotide sequences) or protein sequences can be obtained by searching appropriate databases (e.g., UniProtKB and NCBI). A polynucleotide can be obtained using chemical synthesis, molecular cloning or recombinant methods, DNA or gene assembly methods, artificial gene synthesis, PCR, or any combination of those.

[0033] The gene sequences are those encoding the types of protein described above. The gene sequences may have non-coding introns.

[0034] In the case that there are not sequences available, conserved regions can be used to amplify segments of the genes and the flanking regions can be sequenced in order to obtain the full-length sequence. Multiple sequence alignments of a specific protein in several different organisms will show where the conserved regions lie, and which are the most suitable stretches to use for primer design. Primers with alternative nucleotides can be used when needed.

[0035] Expression Constructs

[0036] A genetic element is any coding or non-coding nucleic acid sequence. A genetic element can be a nucleic acid that codes for an amino acid, a peptide or a protein. Genetic elements may be operons, genes, gene fragments, promoters, exons, introns, regulatory sequences, or any combination of those. A genetic element includes an entire open reading frame of a protein, or the entire open reading frame and one or more (or all) regulatory sequences associated therewith. The genes may be codon optimized for different hosts.

[0037] The term “engineered” or “recombinant” refers to a cell into which a recombinant gene, such as a gene encoding a muscle protein, or part of a muscle protein, has been introduced. Therefore, engineered cells are distinguishable from naturally occurring cells which do not contain a recombinant gene that is introduced by transfection or transformation techniques. Recombinantly introduced genes will either be in the form of a cDNA (i.e., they will not contain introns), a copy of a cDNA gene, genomic DNA (with or without introns; for expression in prokaryotic hosts, the DNA should be without introns), or will include DNA sequences positioned next to a promoter not naturally associated with the particularly introduced gene.

[0038] Disclosed herein are expression vectors comprising a genetic element encoding an animal protein or part of an animal protein and the use thereof for the recombinant expression of the animal protein. The expression vector may further comprise a promoter. The promoter may be a constitutive promoter, an inducible promoter, or a hybrid promoter. In the expression vector, the gene construct and the method, the promoter may be a viral promoter, a prokaryotic promoter or a eukaryotic promoter. The promoter may be a synthetic promoter from a promoter library. The promoter may be any scientifically known promoter or a novel promoter. The promoter may be an engineered form of a known promoter or a hybrid promoter.

[0039] The eukaryotic promoter may be a fungi promoter, a plant promoter, or an animal promoter. The fungi promoter may be the promoter of the genes phosphoglycerate kinase (PGK, PGK1, PGK3), enolase (ENO, ENOl), glyceraldehyde-3-phosphate dehydrogenase (gpdA, GAP, GAPDH), hexokinase, pyruvate decarboxylase, phosphofructokinase, glucose-6-phosphate isomerase, 3-phosphoglycerate mutase, pyruvate kinase (pki1), triosephosphate isomerase, phosphoglucose isomerase, glucokinase, alcohol dehydrogenase promoter (ADH1, ADH2, ADH4), isocytochrome C, acidic phosphatase, galactose metabolism enzymesGAL (GAL1, GAL2, GAL3, GAL4, GAL5, GAL6, GAL7, GAL8, GAL9, GAL10), alternative oxidase (AOD), alcohol oxidase I (AOX1), alcohol oxidase 2 (AOX2), CUP1, AHSB4m, adhl+, AINV, alcA, AXDH, cellobiohydrolase I (cbhl), ccg-1, cDNA1, cellular filament polypeptide (cfp), cpc-2, ctr4+, dihydroxyacetone synthase (DAS), FMD, formate dehydrogenase (FMDH), formaldehyde dehydrogenase (FLD1), GAA, GCW14, glucoamylase (glaA, gla-1), inv1, isocitrate lyase (ICL1), glycerol kinase (GUT1), acetohydroxy acid isomeroreductase (ILV5), β-galactosidase (lac4), LEU2, melO, MET3, MET25, KAR2, KEX2, methanol oxidase (MOX), nmtl, peroxin 8 (PEX8), pcbC, PET9, PH05, PH089, PYK1, phosphatidylinositol synthase (PIS1), RPS7, TEF, translation elongation factor 1 alpha (TEF1), sorbitol dehydrogenase (SDH), SSA4, THI11, homoserine kinase, XRP2, TPI, and YPT1, PHO5, CYC1, HISS, ADC1, TAP1, URA3, LEU2, TP1, TDH1, TDH3, FBA1, ADR1, TPI1, or any combination of those.

[0040] The plant promoter may be the promoter of the gene phol, TPI, TPS1, and any combination of these.

[0041] The animal promoter may be a heat-shock protein promoter, proactin promoter, immunoglobulin promoter, or the promoter of the gene B2, HSP82, Ser1, triose phosphate isomerase (TPI1), or any combination of those. However, any promoters can be used if they drive the expression of recombinant proteins in a particular host cell.

[0042] The expression vector may include an auxotrophic marker. The auxotrophic marker may be selected from the group consisting of adel, arg4, his4, ura3, and met2. The expression vector may comprise a selectable marker, which may be a resistance gene. The resistance gene may confer resistance to drugs including, but not limited to, zeocin, ampicillin, blasticidin, kanamycin, nurseothricin, chloroamphenicol, tetracycline, triclosan, ganciclovir.

[0043] The prokaryotic promoter may be the T7, heat-shock protein (HSP) 70, beta-lactamase, a-amylase, alkaline phosphatase, trp operon, lac operon, tac, trc, gdhA, fic, bgl, xylA, xylS, AraC, lacSynth, P11, P43, trnQ, sigX, groES, ftsH, and Pm.

[0044] In certain embodiments, the compositions of the invention include a host cell transformed with a vector to express one or more recombinant animal muscle proteins. The vector or required genetic segments along with genes of interest may be genomically integrated. Alternatively, or in addition, the host cell may comprise multiple copies of an expression vector. The expression vector may comprise a plasmid. Cells may be transformed by transfection, endocytosis, F-mating, PEG-mediated protoplast fusion, Agrobacterium tumefaciens-mediated transformation, chemical transformation, electroporation, or biolistic transformation.

[0045] The construct may encode a signal peptide. A signal peptide, also identified as a signal sequence, targeting signal, localization signal, localization sequence, secretion signal, transit peptide, leader sequence, or leader peptide, may cause secretion of a protein. Extracellular secretion of a recombinant or heterologously expressed animal protein from a host cell simplifies protein purification. Recovery of a recombinant animal protein from a cell culture supernatant may be preferable to lysing host cells to release a complex mixture of proteins including intracellular proteins of the host cell. Secretion may reduce harmful effects that intracellular overexpression of a recombinant or heterologous animal protein may have on a host cell such as toxicity or reduced growth rate. Secretion may produce higher amounts of heterologous animal protein compared to intracellular expression. Secretion of a protein may also enable post-translational modification (e.g., glycosylations) or aid in folding the protein correctly and allow for the formation of disulfide bonds.

[0046] Food and Feed Compositions

[0047] The recombinant protein composition may be incorporated into food or feed at percentages (based on dry mass) of 0.1-95%, typically between 10% and 90%, more typically between 5% and 50%, including ranges of 5%-10%, 10-20%, 20-30%, 30-40%, 40-50%, but also including 60-70%, 70-80% and 80%-90% and combinations of these ranges (e.g., 30%-70%). The recombinant protein compositions can be used in dry or wet food. In preferred embodiments, the end users are companion animals such as dogs and cats. Other users include the animals described herein, including humans.

[0048] The recombinant animal protein is typically mixed with other ingredients. The ingredients are any ingredient suitable for consumption by the pet or person. Typical food ingredients include but are not limited to carbohydrates, fats, proteins, fibers, and nutrients such as vitamins, minerals, and trace elements. People skilled in the art can select the amount and type of food ingredients for a typical food based upon the dietary requirements of the pet or person, which can depend on the species, age, size, weight, health, and function.

[0049] The food composition can comprise 100% of any particular food ingredient or can comprise a mixture of food ingredients in various proportions. Preferably, the food composition will include, by mass, 5-50% protein, 0.01-1.5% sodium, 0.01-1.5% potassium, 0-50% fat, 0-75% carbohydrate, 0-40% dietary fiber, and 0-15% of other nutrients.

[0050] Fat and carbohydrates are obtained from a variety of sources including but not limited to animal fat, fish oil, vegetable oil, meat, meat by-products, grains, other animal or plant sources, and combinations of those. Grains include but are not limited to rice, wheat, corn, barley, buckwheat, sorghum, oats, and quinoa. Other plant sources include but are not limited to pulses (chickpeas and different beans) and edible roots (e.g. potato, sweet potato, carrot, cassava, and turnips).

[0051] The supplemental protein food ingredient can be obtained from a variety of sources including plants, animals, or microbes (unicellular and multicellular). Animal protein includes meat, meat by-products, dairy, and eggs. Meats include the flesh from poultry, fish, and animals such as cattle, swine, sheep, goats, and the like. Meat by-products include but are not limited to kidneys, lungs, livers, stomachs, and intestines. The supplemental protein food ingredient may also be free amino acids and/or peptides.

[0052] The fiber food ingredient is obtained from a variety of sources such as vegetable fiber sources, including but not limited to beans, cellulose, beet pulp, parsnips, broccoli, peanut hulls, carrots, spinach, and soy fiber.

[0053] The nutrients are obtained from a variety of sources known to people skilled in the art, e.g., vitamin and mineral supplements and food ingredients. Vitamins and minerals can be included in amounts required to avoid deficiency and maintain health. These amounts are readily available in the art. The National Research Council (NRC) provides recommended amounts of such nutrients for farm animals. See, e.g., Nutrient Requirements of Swine (11th Rev. Ed., National Academy Press, Wash. D.C., 2012), Nutrient Requirements of Poultry (9th Rev. Ed., National Academy Press, Wash. D.C., 1994), Nutrient Requirements of Horses (6th Rev. Ed., National Academy Press, Wash. D.C., 2007). The American Feed Control Officials (AAFCO) provides recommended amounts of such nutrients for dogs and cats. See American Feed Control Officials, Inc. (Official publication, 2018). Vitamins generally useful as food additives include vitamin A, vitamin B1, vitamin B2, vitamin B6, vitamin B12, vitamin D, biotin, vitamin K, folic acid, inositol, niacin, and pantothenic acid. Minerals and trace elements useful as food additives include calcium, phosphorus, sodium, chloride, potassium, magnesium, iron, copper, zinc, selenium, and iodine. In certain embodiments, the food compositions comprise taurine.

[0054] In certain embodiments, the recombinant animal protein is not isolated from the host organism recombinantly expressing the protein prior to mixing with the food composition. The host organism itself, and the recombinant protein expressed within or on its surface, can be added to the food composition.

[0055] The food compositions can be in any form useful for feeding the composition to an animal, e.g., kibbles, treats, and toys for animal food. The food compositions can be freeze-dried, dehydrated, air dried, or used as coatings. Kibbles are generally formed using an extrusion process in which the mixture of dry and wet ingredients is mechanically worked at high temperature and pressure and pushed through small openings and cut off into kibble by a rotating knife. The wet kibble is dried and can be coated with one or more topical coatings such as flavors, fats, oils, powders, etc. Kibble also can be made using a baking process when the mix is placed into a mold before dry-heat treatment. Treats may be nutritional and may contain one or more nutrients and may have a food-like composition. Non-nutritional treats are any other treats that are non-toxic. The composition or components are coated onto the treat, incorporated into the treat, or both. Treats of the present invention can be prepared by an extrusion or baking process similar to those used for dry food. Other processes may also be used to either coat the composition on the exterior or inject the composition into an existing treat form. Toys include chewable toys such as artificial bones and food compositions shaped to look like natural foods that are appealing to the animal. The food compositions can be packaged in cans, trays, tubs, pouches, bags, or any other suitable container.

### Pharmaceutical Compositions of the Invention

[0056] Methods for treatment of diseases are also encompassed by the present invention. Said methods of the invention include administering a therapeutically effective amount of the recombinant animal protein or a food composition comprising the recombinant animal protein. The recombinant animal proteins of the invention can be formulated in pharmaceutical compositions or therapeutic food compositions. These compositions can comprise, in addition to one or more of the recombinant animal proteins, a pharmaceutically acceptable excipient, carrier, buffer, stabilizer or other materials well known to those skilled in the art. Such materials should be non-toxic and should not interfere with the efficacy of the active ingredient. The precise nature of the carrier or other material can depend on the route of administration, e.g., oral, intravenous, cutaneous or subcutaneous, nasal, intramuscular, intraperitoneal routes.

[0057] Pharmaceutical compositions for oral administration can be in tablet, capsule, powder or liquid form. A tablet can include a solid carrier such as gelatin or an adjuvant. Liquid pharmaceutical compositions generally include a liquid carrier such as water, petroleum, animal or vegetable oils, mineral oil or synthetic oil. Physiological saline solution, dextrose or other saccharide solution or glycols such as ethylene glycol, propylene glycol or polyethylene glycol can be included.

[0058] For intravenous, cutaneous or subcutaneous injection, or injection at the site of affliction, the active ingredient will be in the form of a parenterally acceptable aqueous solution which is pyrogen-free and has suitable pH, isotonicity and stability. Those of relevant skill in the art are well able to prepare suitable solutions using, for example, isotonic vehicles such as Sodium Chloride Injection, Ringer's Injection, Lactated Ringer's Injection. Preservatives, stabilisers, buffers, antioxidants and/or other additives can be included, as required.

[0059] For treatment purposes, administration of the food composition comprising the recombinantly produced animal protein is preferably in a “therapeutically effective amount” or “prophylactically effective amount” (as the case can be, although prophylaxis can be considered therapy), this being sufficient to show benefit to the animal or individual. The actual amount administered, and rate and time-course of administration, will depend on the nature and severity of protein aggregation disease being treated. Prescription of treatment, e.g., decisions on dosage, etc., is within the responsibility of general practitioners and other medical doctors, and typically takes account of the disorder to be treated, the condition of the individual patient, the site of delivery, the method of administration and other factors known to practitioners. Examples of the techniques and protocols mentioned above can be found in Remington's Pharmaceutical Sciences, 16th edition, Osol, A. (ed), 1980.

[0060] A food composition of the invention described herein can be administered alone or in combination with other treatments, either simultaneously or sequentially, dependent upon the condition to be treated.

### METHODS OF THE INVENTION

[0061] In certain embodiments, the invention includes cultivating the host cell and expressing the recombinant animal proteins intracellularly or secreted into the culture broth.

[0062] Harvesting and Processing

[0063] Cells expressing recombinant animal protein may be harvested by batch centrifugation, continuous flow centrifugation, filter press, flocculation, rotary drum vacuum filtration, tangential flow filtration, or ultrafiltration.

[0064] Cells may be lysed by raising temperature, autolysis, by high pressure homogenization (e.g., French press), ultrasonic cavitation, bead beating, rotor-stator processors, freeze-thaw cycles, enzymatic lysis (e.g., lysozyme, lysostaphin, zymolase, cellulose, protease or glycanase), osmotic shock methods, chemical lysis (by alkaline, detergent or organic solvent) or a combination of these methods. Secreted recombinant animal proteins can be isolated from growth media using well-known techniques.

[0065] The whole cell fraction or proteins may be dried by drum drying, spray drying, lyophilization, fluidized bed drying, or other commonly used methods.

### EXAMPLES

[0066] Below are examples of specific embodiments for carrying out the present invention. The examples are offered for illustrative purposes only, and are not intended to limit the scope of the present invention in any way. Efforts have been made to ensure accuracy with respect to numbers used (e.g., amounts, temperatures, etc.), but some experimental error and deviation should, of course, be allowed for.

[0067] The practice of the present invention will employ, unless otherwise indicated, conventional methods of protein chemistry, biochemistry, recombinant DNA techniques and pharmacology, within the skill of the art. Such techniques are explained fully in the literature. See, e.g., T. E. Creighton, Proteins: Structures and Molecular Properties (W.H. Freeman and Company, 1993); A. L. Lehninger, Biochemistry (Worth Publishers, Inc., current addition); Sambrook, et al., Molecular Cloning: A Laboratory Manual (2nd Edition, 1989); Methods In Enzymology (S. Colowick and N. Kaplan eds., Academic Press, Inc.); Remington's Pharmaceutical Sciences, 18th Edition (Easton, Pa.: Mack Publishing Company, 1990); Carey and Sundberg Advanced Organic Chemistry 3^{rd} Ed. (Plenum Press) Vols A and B (1992). Also referred to below are the following references: (1) M. R. Green and J. Sambrook, Molecular Cloning: A Laboratory Manual, 4th Edition, Cold Spring Harbor, N.Y.: Cold Spring Harbor Laboratory Press, 2012, pp. 1009-1011. (2) G. C. U. F. T. Tool, GenScript, [Online]. Available: https://www.genscript.com/tools/codon-frequency-table. [Accessed 18 12 2018]. (3) S. Wu and L. J. Geoffrey, “High efficiency transformation by electroporation of Pichia pastoris pretreated with lithium acetate and dithiothreitol,” Drug Discovery and genomic technologies, vol. 36, no. 1, pp. 152-154, 2004. (4) S. Kawai, W. Hashimoto and K. Murata, “Transformation of Saccharomyces cerevisiae and other fungi,” Bioengineered Bugs, vol. 1, no. 6, pp. 395-403, 2010. (5) P. Manivasakam and R. H. Schiestl, “High efficiency transformation of Saccharomyces cerevisiae by electroporation,” Nucleic Acids Research, vol. 21, no. 18, pp. 4414-4415, 1993.

### Example 1: Expression of Recombinant Actin Protein in a Eukaryotic Host

[0068] Actin is the major component of the cytoskeleton. It exists in two different forms, a monomeric form (G-actin) and a filamentous form (F-actin). G-actin polymerizes to form F-actin, and it is primarily these filaments that participate in processes such as cell motility, transport, and cytokinesis [20]. The actin-binding domain is highly conserved amongst species. Actin-binding proteins share a common binding area on the actin surface, consistent of the cleft between actin sub domains 1 and 3 [21]. There is also a nucleotide-binding site, which is a cleft between subdomains 2 and 4. The binding of adenosine 5′-triphosphate or ATP and subsequent hydrolysis into adenosine 5′-diphosphate or ADP is known to be a critical element in controlling the association of actin with itself and with other proteins. When ATP is bound to actin it polymerizes faster and dissociates slower than ADP-actin [22].

[0069] Single and double mutants of the ATP-binding site of actin will ablate its toxicity in prokaryotic expression hosts and thus increase expression levels. The residues targeted by mutagenesis are P-72, E-74, 1-77, and T-79 (numbering for pig (SEQ P68137), chicken (SEQ P68139), and cow (SEQ P68138)). Recombinant actin protein mutated at these sites will be over-expressed in a prokaryotic host organism, isolated, and incorporated into a companion animal food product.

[0070] In one embodiment, then, the invention provides a food composition comprising a recombinant actin protein, wherein said recombinant actin protein comprises one or more mutations from the group consisting of P-72, E-74, 1-77 and T-79. In certain related embodiments, the recombinant actin protein is a fragment of actin protein comprising the aforementioned residues.

### Example 2: Identification of Recombinant Actin Sequences for Over-Expression in Prokaryotes

[0071] Actin is highly conserved between widely divergent species. For instance, there is 87% sequence identity (325 of 374 amino acids) between yeast and human actin. Comparing chicken, cow, pig, human, and Saccharomyces cerevisiae, there are 319 conserved residues. A library of point mutations is made at each of these conserved positions and those mutations that are permissive of high levels of expression of mutant actin are identified.

### Example 3: Engineered Animal Proteins for Over-Expression in Prokaryotic Cells

[0072] Error-prone PCR with/without shuffling will be used across the DNA coding sequence (cDNA) to create mutated DNAs encoding animal protein sequences. Prokaryotic hosts recombinantly expressing the mutant sequences will be screened for high growth and high expression of the target protein.

[0073] The genes and the proteins encoded by the genes may also be truncated in order to yield a high expression and fast cell growth. Modifications of the gene sequence (e.g., the addition or removal of certain amino acids) will, in some cases, increase cell viability and increase the rate of cell division. Proteins that are too large to overexpress efficiently will be truncated in order to increase the expression level.

[0074] The prokaryotic promoter may be the T7, heat-shock protein (HSP) 70, beta-lactamase, a-amylase, alkaline phosphatase, trp operon, lac operon, tac, trc, gdhA, fic, bgl, xylA, xylS, AraC, lacSynth, P11, P43, trnQ, sigX, groES, ftsH, and Pm.

### Example 5: Insertion of a Chicken Myosin Regulatory Light Chain 2, Skeletal Muscle Isoform, Gene into a Lactococcus lactis Strain and Intracellular Expression of the Corresponding Protein

[0075] The expression vector pNZ8152 (MoBiTec GmbH, Gottingen, Germany) is a Gram-positive broad host range vector. Taking advantage of the nisA promoter, it allows intracellular recombinant protein expression via induction with nisin. The vector pNZ8152 also contains the selectable marker alanine racemase gene alr, which restores auxotrophy to D-alanine caused by a deletion of the host cell copy of alr. The vector is linearized using HindIIII restriction enzyme (New England Biolabs, Ipswich, Mass.) and dephosphorylated using established molecular cloning methods [1]. Linearized vector is separated using agarose gel electrophoresis. An agarose gel section containing linearized vector is collected and the linearized plasmid is purified from the agarose using a commercially available DNA purification kit, e.g. the QIAquick Gel Extraction Kit (Qiagen, Germantown, Md.).

[0076] The gene sequence for chicken myosin regulatory light chain 2, skeletal muscle isoform, (MYLPF) can be obtained from UniProt.org under accession number P02609. The double-stranded DNA is constructed through chemical gene synthesis from either ATUM (Newark, Calif.), Genscript (Piscataway, N.J.), or IDT (Coralville, Iowa). It is supplied in a vector of choice. The DNA sequence can also be obtained via amplification of cDNA generated directly from a mRNA of a biological sample, such as a tissue or a blood sample from a chicken donor. The gene sequence is modified to aid in cloning, gene expression, or enhance production. It is “codon optimized”, i.e. triplet DNA sequences that are not commonly used in the expression host are changed to those that are commonly used.

[0077] The codon optimized myosin regulatory light chain 2, skeletal muscle isoform, gene (MYLPF), containing exons, but no introns, is ligated to the linearized and purified pNZ8152 vector via enzymatic ligation to generate a vector capable of being inserted into a host organism. The method used is known in the art and the protocol can be obtained from a molecular cloning manual [1].

[0078] The host organism in this example is Lactococcus lactis strain NZ9130 (MoBiTech). This strain contains genes nisR and nisK, which are needed for nisin-regulated gene expression, as well as a deletion of the alr gene encoding an alanine racemase, causing auxotrophy to D-alanine.

[0079] The pNZ8152 vector construct containing the codon optimized myozenin gene is transformed into host strain Lactococcus lactis NZ9130 via electroporation using instrument settings of 2.0 kV, 25 μf, and 200Ω. Electrocompetent cells are obtained via methods known in the art [3]. Chemical transformation or another method can also be used. Successful clones are selected for on agar plates prepared with M17 medium containing 0.5% (w/v) glucose grown at 30° C. As this medium does not contain D-alanine, only host cells that contain a copy of the plasmid pNZ8152 will be able to proliferate. Colonies are picked and cultured at 30° C. in M17 medium with 0.5% (w/v) glucose for 48 hours in a non-aerated environment. A successful clone containing a copy of the chicken myosin regulatory light chain 2 gene, skeletal muscle isoform, is confirmed by sequencing for insert identity and orientation using established methods such as PCR [1]. Protein expression using the successful clone is induced by culturing in M17 medium with 0.5% (w/v) glucose at 30° C. in a non-aerated environment for 4 hours after cells have reached stationary phase by supplementing 1 ng/mL of nisin. The cells are pelleted by centrifugation and the cell pellets are lysed by methods known in the art, e.g. by sonication [1] and analyzed for protein expression by SDS-PAGE.

[0080] Other variants of Lactococcus or Lactobacillus can also be used. The codon usage table is obtained from Kazusa DNA Research Institute.

### Example 6: Insertion of a Chicken Myosin Regulatory Light Chain 2, Skeletal Muscle Isoform, Gene into a Lactococcus lactis Strain and Extracellular Expression of the Corresponding Protein

[0081] The expression vector pNZ8121 (MoBiTec GmbH, Gottingen, Germany) is a Gram-positive broad host range vector. Taking advantage of the nisA promoter, it allows intracellular recombinant protein expression via induction with nisin. It also allows for recombinant protein secretion using the signal sequence PrtP. The vector pNZ8121 also contains the selectable marker conferring resistance to chloramphenicol. The vector is linearized using EcoRV restriction enzyme (New England Biolabs, Ipswich, Mass.) and dephosphorylated using established molecular scolong methods [1]. Linearized vector is separated using agarose gel electrophoresis. An agarose gel section containing linearized vector is collected and the linearized plasmid is purified from the agarose using a commercially available DNA purification kit, e.g. the QIAquick Gel Extraction Kit (Qiagen, Germantown, Md.).

[0082] The gene sequence for chicken myosin regulatory light chain 2, skeletal muscle isoform, (MYLPF) can be obtained from UniProt.org under accession number P02609. The double-stranded DNA is constructed through chemical gene synthesis from either ATUM (Newark, Calif.), Genscript (Piscataway, N.J.), or IDT (Coralville, Iowa). It is supplied in a vector of choice. The DNA sequence can also be obtained via amplification of cDNA generated directly from a mRNA of a biological sample, such as a tissue or a blood sample from a chicken donor. The gene sequence is modified to aid in cloning, gene expression, or enhance production. It is “codon optimized”, i.e. triplet DNA sequences that are not commonly used in the expression host are changed to those that are commonly used.

[0083] The codon optimized myosin regulatory light chain 2, skeletal muscle isoform, gene (MYLPF), containing exons, but no introns, is ligated to the linearized and purified pNZ8152 vector via enzymatic ligation to generate a vector capable of being inserted into a host organism. The method used is known in the art and the protocol can be obtained from a molecular cloning manual [1].

[0084] The host organism in this example is Lactococcus lactis strain NZ9100 (MoBiTech GmbH). This strain contains genes nisR and nisK, which are needed for nisin-regulated gene expression.

[0085] The pNZ8121 vector construct containing the codon optimized myozenin gene is transformed into host strain Lactococcus lactis NZ9100 via electroporation using instrument settings of 2.0 kV, 25 μf, and 200Ω. Electrocompetent cells are obtained via methods known in the art [3]. Chemical transformation or another method can also be used. Successful clones are selected for on agar plates prepared with M17 medium containing 0.5% (w/v) glucose and 10 micrograms/mL chloramphenicol grown at 30° C. Colonies are picked and cultured at 30° C. in M17 medium with 0.5% (w/v) glucose and 10 micrograms/mL chloramphenicol for 48 hours in a non-aerated environment. A successful clone containing a copy of the myosin regulatory light chain 2 gene, skeletal muscle isoform, is confirmed by sequencing for insert identity and orientation using established methods such as PCR [1]. Protein expression using the successful clone is induced by culturing in M17 medium with 0.5% (w/v) glucose at 30° C. in a non-aerated environment until stationary phase at which 1 ng/mL of nisin is supplemented for induction. The induction phase is approximately 4 hours. Cultures are clarified via centrifugation and supernatant is analyzed for protein expression by SDS-PAGE.

[0086] Other variants of Lactococcus or Lactobacillus can also be used. The codon usage table is obtained from Kazusa DNA Research Institute.

[0087] While the invention has been particularly shown and described with reference to a preferred embodiment and various alternate embodiments, it will be understood by persons skilled in the relevant art that various changes in form and details can be made therein without departing from the spirit and scope of the invention.

[0088] All references, issued patents and patent applications cited within the body of the instant specification are hereby incorporated by reference in their entirety, for all purposes.

### REFERENCES CITED

[0089] [1] H. F. Gemede and N. Ratta, “Antinutritional factors in plant foods: Potential health benefits and adverse effects,” International Journal of Nutrition and Food Sciences, vol. 3, no. 4, pp. 284-289, 2014.
[0090] [2] G. Rimbach, J. Pallauf, J. Moehring, K. Kraemer and A. M. Minihane, “Effect of dietary phytate and microbial phyatse on mineral and traceelement bioavailability—a literature review,” Current Topics in Nutraceutical Research, vol. 6, no. 3, pp. 131-144, 2008.
[0091] [3] R. M. Yamka, U. Jamikorn, A. D. True and D. L. Harmon, “Evaluation of soyabean meal as a protein source in canine foods,” Animal Feed Science and Technology, vol. 109, pp. 121-132, 2003.
[0092] [4] K. E. Michel, “Unconventional Diets for Dogs and Cats,” Veterinary Clinics: Small Animal Practice, vol. 36, no. 6, p. 1269-1281, 2006.

[0093] [5] K. Kanakubo, A. J. Fascetti and J. A. Larsen, “Assessment of protein and amino acid concentrations and labeling adequacy of commercial vegetarian diets formulated for dogs and cats,” Journal of the American Veterinary Medical Association, vol. 247, no. 4, pp. 385-392, 2015.
[0094] [6] M. Friedman, “Nutritional Value of Proteins from Different Food Sources. A Review,” Journal of Agricultural and Food Chemistry, vol. 44, pp. 6-29, 1996.
[0095] [7] C. M. Gray, R. K. Sellon and L. M. Freeman, “Nutritional adequacy of two vegan diets for cats,” Timely Topics in Nutrition, vol. 225, no. 11, pp. 1670-1675, 2004.
[0096] [8] A. Knight and M. Leitsberger, “Vegetarian versus Meat-Based Diets for Companion Animals,” Animals, vol. 6, no. 57, pp. 1-20, 2016.
[0097] [9] J. L. Kaplan, J. A. Stern, A. J. Fascetti, J. A. Larsen, H. Skolnik, G. D. Peddle, R. D. Kienle, A. C. M. Waxman, C. T. Gunther-Harrington, T. Klose, K. LaFauci and B. Lefbom, “Taurine deficiency and dilated cardiomyopathy in golden retrievers fed commercial diets,” PLOS ONE, 13 Dec. 2018.
[0098] [10] M. M. Rojas-Downing, A. P. Nejadhashemi, T. Harrigan and S. A. Woznicki, “Climate change and livestock: Impacts, adaptation, and mitigation,” Climate Risk Management, vol. 16, pp. 145-163, 2017.
[0099] [11] Y. M. Bar-On, R. Phillips and R. Milo, “The biomass distribution on Earth,” PNAS, vol. 115, no. 25, pp. 6506-6511, 2018.
[0100] [12] “Living Planet Report 2016,” World Wide Fund For Nature, Gland, Switzerland, 2016.
[0101] [13] F. P. J. van Bree, G. C. A. M. Bokken, R. Mineur, F. Franssen, M. Opsteegh, J. W. B. van der Giessen, L. J. A. Lipman and P. A. M. Overgaauw, “Zoonotic bacteria and parasites found in raw meat-based diets for cats and dogs,” Veterinary Record, p. 10.1136/vr.104535, 2018.
[0102] [14] A. G. Mathew, R. Cissell and S. Liamthong, “Antibiotic Resistance in Bacteria Associated with Food Animals: A United States Perspective of Livestock Production,” FOODBORNE PATHOGENS AND DISEASE, vol. 4, no. 2, pp. 115-133, 2007.
[0103] [15] S. A. McEwen and P. J. Fedorka-Cray, “Antimicrobial Use and Resistance in Animals,” Clinical Infectious Diseases, vol. 34, no. Suppl 3, pp. S93-S106, 2002.
[0104] [16] W. Witte, “Selective pressure by antibiotic use in livestock,” International Journal of Antimicrobial Agents, vol. 16, pp. S19-S24, 2000.
[0105] [17] “Summary Report On Antimicrobials Sold or Distributed for Use in Food-Producing Animals,” Food and Drug Administration, 2014.
[0106] [18] J. E. Markovich, C. R. Heinze and L. M. Freeman, “Thiamine deficiency in dogs and cats,” Journal of the American Veterinary Medical Association, vol. 243, no. 5, pp. 649-656, 2013.
[0107] [19] M. Steer, “A COMPARISON OF LAND, WATER AND ENERGY USE BETWEEN CONVENTIONAL AND YEAST-DERIVED DAIRY PRODUCTS: AN INITIAL ANALYSIS,” University of the West of England, 2015.
[0108] [20] X. Zheng, K. Diraviyam and D. Sept, “Nucleotide Effects on the Structure and Dynamics of Actin,” Biophysical Journal, vol. 93, no. 4, p. 1277-1283, 2007.
[0109] [21] R. Dominguez, “A Common Binding Site for Actin-Binding Proteins on the Actin Surface,” in Actin-Monomer-Binding Proteins, New York, N.Y.: Springer, 2007.
[0110] [22] T. D. Pollard and G. G. Borisy, “Cellular Motility Driven by Assembly and Disassembly of Actin Filaments,” Cell, vol. 112, no. 4, pp. 453-465, 2003.

TABLE 1
Skeletal muscle tissue
>tr|A4IFM8|A4IFM8BOVIN Actin, alpha 1, skeletal muscle OS = Bos taurus OX = 9913 GN = ACTA1
PE = 2 SV = 1
MCDEDETTALVCDNGSGLVKAGFAGDDAPRAVFPSIVGRPRHQGVMVGMGQKDSYVGDEAQSKKGILTLKYPIEHGIITNWDDMEKIWHHTFY
NELRVAPEEHPTLLTEAPLNPKANREKMTQIMFETFNVPAMYVAIQAVLSLYASGRTTGIVLDSGDGVTHNVPIYEGYALPHAIMRLDLAGRD
LTDYLMKILTERGYSFVTTAEREIVRDIKEKLCYVALDFENEMATAASSSSLEKSYELPDGQVITIGNERFRCPETLFQPSFIGMESAGIHET
TYNSIMKCDIDIRKDLYANNVMSGGTTMYPGIADRMQKEITALAPSTMKIKIIAPPERKYSVWIGGSILASLSTFQQMWITKQEYDEAGPSIV
HRKCF (SEQ ID NO: 1)
>sp|P68137|ACTS_PIG Actin, alpha skeletal muscle OS = Sus scrofa OX = 9823 GN = ACTA1 PE = 1
SV = 1
MCDEDETTALVCDNGSGLVKAGFAGDDAPRAVFPSIVGRPRHQGVMVGMGQKDSYVGDEAQSKRGILTLKYPIEHGIITNWDDMEKIWHHTFY
NELRVAPEEHPTLLTEAPLNPKANREKMTQIMFETFNVPAMYVAIQAVLSLYASGRTTGIVLDSGDGVTHNVPIYEGYALPHAIMRLDLAGRD
LTDYLMKILTERGYSFVTTAEREIVRDIKEKLCYVALDFENEMATAASSSSLEKSYELPDGQVITIGNERFRCPETLFQPSFIGMESAGIHET
TYNSIMKCDIDIRKDLYANNVMSGGTTMYPGIADRMQKEITALAPSTMKIKIIAPPERKYSVWIGGSILASLSTFQQMWITKQEYDEAGPSIV
HRKCF (SEQ ID NO: 2)
>sp|P68139|ACTS_CHICK Actin, alpha skeletal muscle OS = Gallus gallus OX = 9031 GN = ACTA1
PE = 1 SV = 1
MCDEDETTALVCDNGSGLVKAGFAGDDAPRAVFPSIVGRPRHQGVMVGMGQKDSYVGDEAQSKRGILTLKYPIEHGIITNWDDMEKIWHHTFY
NELRVAPEEHPTLLTEAPLNPKANREKMTQIMFETFNVPAMYVAIQAVLSLYASGRTTGIVLDSGDGVTHNVPIYEGYALPHAIMRLDLAGRD
LTDYLMKILTERGYSFVTTAEREIVRDIKEKLCYVALDFENEMATAASSSSLEKSYELPDGQVITIGNERFRCPETLFQPSFIGMESAGIHET
TYNSIMKCDIDIRKDLYANNVMSGGTTMYPGIADRMQKEITALAPSTMKIKIIAPPERKYSVWIGGSILASLSTFQQMWITKQEYDEAGPSIV
HRKCF (SEQ ID NO: 3)
>sp|P68138|ACTS_BOVIN Actin, alpha skeletal muscle OS = Bos taurus OX = 9913 GN = ACTA1
PE = 1 SV = 1
MCDEDETTALVCDNGSGLVKAGFAGDDAPRAVFPSIVGRPRHQGVMVGMGQKDSYVGDEAQSKRGILTLKYPIEHGIITNWDDMEKIWHHTFY
NELRVAPEEHPTLLTEAPLNPKANREKMTQIMFETFNVPAMYVAIQAVLSLYASGRTTGIVLDSGDGVTHNVPIYEGYALPHAIMRLDLAGRD
LTDYLMKILTERGYSFVTTAEREIVRDIKEKLCYVALDFENEMATAASSSSLEKSYELPDGQVITIGNERFRCPETLFQPSFIGMESAGIHET
TYNSIMKCDIDIRKDLYANNVMSGGTTMYPGIADRMQKEITALAPSTMKIKIIAPPERKYSVWIGGSILASLSTFQQMWITKQEYDEAGPSIV
HRKCF (SEQ ID NO: 4)
>P02609|MLRS_CHICK Myosin regulatory light chain 2, skeletal muscle isoform
MAPKKAKRRAAEGSSNVFSMFDQTQIQEFKEAFTVIDQNRDGIIDKDDLRETFAAMGRLNVKNEELDAMIKEASGPINFTVFLTMFGEKLKGA
DPEDVIMGAFKVLDPDGKGSIKKSFLEELLTTQCDRFTPEEIKNMWAAFPPDVAGNVDYKNICYVITHGEDKEGE (SEQ ID NO: 5)
>Q9PTY2|Q9PTY2_CHICK Skeletal myosin heavy chain
MSSDAEMAIFGEAAPYLRKSEKERIEAQNKPFDAKTSVFVVHAKESYVKSTIQSKESGKVTVKTESGETLTVKEDQIFSMNPPKYDKIEDMAM
MTHLHEPAVLYNLKERYAAWMIYTYSGLFCVTVNPYKWLPVYNPEVVLAYRGKKRQEAPPHIFSISDNAYQFMLTDRENQSILITGESGAGKT
VNTKRVIQYFATIAASGDKKKEEQPAGKMQGTLEDQIISANPLLEAFGNAKTVRNDNSSRFGKFIRIHFGATGKLASADIETYLLEKSRVTFQ
LKAERSYHIFYQIMSNKKPELIEMLLITTNPYDYHYVSQGEITVPSINDQEELMATDSAIDILGFTPDEKTAIYKLTGAVMHYGNLKFKQKQR
EEQAEPDGTEVADKAAYLMGLNSADLLKALCYPRVKVGNEFVTKGQTVQQVYNSVGALAKAVFEKMFLWMVVRINQQLDTKQPRQYFIGVLDI
AGFEIFDFNSLEQLCINFTNEKLQQFFNHHMFVLEQEEYKKEGIEWEFIDFGMDLAACIELIEKPMGIFSILEEECMFPKATDTSFKNKLYDQ
HLGKSNNFQKPKPGKGKAEAHFSLVHYAGTVDYNISGWLDKNKDPLYETVVGLYQKSSLKTLALLFASAGGEAESGGGGKKGGKKKGSSFQTV
SALFRENLNKLMTNLRSTHPHFVRCIIPNETKTPGAMEHELVLHQLRCNGVLEGIRICRKGFPSRILYADFKQRYKVLNASAIPEGQFIDSKK
ASEKLLGSIDVDHTQYKFGHTKVFFKAGLLGLLEEMRDEKLAQLITRTQARCRGFLMRVEYRRMVERRESIFCIQYNIRSFMNVKHWPWMKLF
FKIKPLLKSAESEKEMANMKGEFEKTKEELAKSGAKRKDLEGKMVSLLQEKNDLQLQVQAEADALADAEERCDQLIKTKIQLEAKIKEVTERA
EDEEEINAELTAKKRKLEDECSELKKDIDDLELTLAKVEKEKHATENKVKNLTEEMAALDENIAKLTKEKKAPQEAHQQTLDDLQAEEDKVNT
LTKAKTKLEQQVDDLEGSLEQEKKLRMDLERAKRKLEGDLKLAHDSIMDLENDKQQLDEKLKKKDFEISQIQSKIEDEQALGMQLQKKIKELQ
ARTEELEEEIEAERTSRAKAEKHRADLSRELEEISERLEEAGGATAAQIDMNKKREAEFQKMRRDLEEATLQHEATAAALRKKHADSTAELGE
QIDNLQRVKQKLEKEKSELKMEIDDLASNMESVSKAKASLEKTCRALEDQMSEIKTKEEEHQRMINDVNAQRARLQTESGEYSRQVEEKDALI
SQLSRGKQAFTQQIEELKRHLEEEIKAKNALAHGLQSARHDCDLLREQYEEEQEAKGELQRALSKANSEVAQWRTKYETDAIQRTEELEEAKK
KLAQRLQDAEEHVEAVNSKCASLEKTKQRLQNEVEDLMIDVERANSACAALDKKQKNEDKILSEWKQKYEETQAELEASQKESRSLSTELFKM
KNAYEESLDHLETLKRENKNLQQEISDLTEQIAEGGKAIHELEKVKKQIEQEKSELQASLEEAEASLEHEEGKILRLQLELNQVKSEIDRKIA
EKDEEIDQLKRNHLRIVESMQRTLDAEVRSRNEALRLKKKMEGDLNEMEIQLNHANRMAAEAQKNLRNTQGVLKDTQIHLDDALRSQEDLKEQ
VAMVERRANLLQAETEELRAALEQTERSRKVAEQELLDASERVQLLHTQNTSLINTKKKLESDISQIQSEMEDTIQEARNAEEKAKKAITDAA
MMAEELKKEQDTSAHLERMKKNLDQTVKDLQHRLDEAEQLALKGGKKQIQKLEARVRELEGEVDAEQKRSAEAVKGVRKYERRVKELTYQSEE
DRKNVLRLQDLVDKLQMKVKSYKRQAEEAEELSNVNLSKFRKIQHELEEAEERADIAESQVNKLRVKSREFHKKIEEEEI
(SEQ ID NO: 6)
>tr|A0A1S3L3X1|A0A1S3L3X1_SALSA myosin heavy chain, fast skeletal muscle-like isoform X2
OS = Salmo salar OX = 8030 GN = LOC106564162 PE = 3 SV = 1
MSTDAEMQVYGKAAIYLRKSEKERMEAQAMPFDSKNSCYVTDKVELYLKGLVTARADGKCTVTVTKPDGTKEEGKEFKDADIYEMNPPKYDKI
EDMAMMTYLNEASVLYNLKERYAAWMIYTYSGLFCATVNPYKWLPVYDEEVVNAYRGKKRVEAPPHIFSVSDNAFQFMMIDKENQSVLITGES
GAGKTVNTKRVIQYFATIAVSGGKKEADPNKMQGSLEDQIIAANPLLESYGNAKTVRNDNSSRFGKFIRIHFQAGKLAKADIETYLLEKSRVS
FQLPDERGYHIFFQMMTGHKPELVELALLTTNPYDFPMCSQGQIAVASINDNEELDATDEAITILGETNEEKLGIYKLTGAVVHHGNLKFKQK
QREEQAEPDGTEVADKIAYLLGLNSAEMLKALCYPRVKVGNEYVTKGQTVAQVNNSVSALAKSIYERMFLWMVIRINEMLDTKNPRQFYIGVL
DIAGFEIFDYNSMEQLCINFTNEKLQQFFNHTMFVLEQEEYKKEGIVWAFIDFGMDLAACIELIEKPLGIFSILEEECMFPKSSDTTFKDKLY
AQHLGKTKAFEKPKPAKGKAEAHFSLVHYAGTVDYNITGWLEKNKDPLNDSVCQLYGKSGVKILAALYPPPPPEDKAKKGGKKKGGSMQTVSS
QFRENLHKLMTNLRSTHPHFVRCLIPNESKTPGLMENFLVIHQLRCNGVLEGIRICRKGFPSRIIYADFKQRYKVLNASVIPEGQFMDNKKAS
EKLLGSIDVNHEDYKFGHTKVFFKAGLLGVLEEMRDEKLATLVGMVQALSRGFLMRREFSKMMERRESIYAIQYNIRSFMNVKTWPWMKLYFK
IKPLLQSAETEKELANMKENYEKMKTDLAKALSTKKQMEEKLVSLTQEKNDLALQVASEGESLNDAEERCEGLIKSKIQQEAKLKETTERLED
EEEINAELTAKKRKLEDECSELKKDIDDLELTLAKVEKEKHATENKVKNLTEEMASMDESVAKLTKEKKALQEAHQQTLDDLQAEEDKVNTLT
KAKTKLEQQVDDLEGSLEQEKKLRMDLERAKRKLEGDLKLAQESIMDLENDKQQADEKIKKKEFETTQLLSKIEDEQSLGAQLQKKIKELQAR
IEELEEEIEAERAARAKVEKQRADLSRELEEISERLEEAGGATAAQIEMNKKREAEFQKLRRDLEESTLQHEATAAALRKKQADSVAELGEQI
DNLQRVKQKLEKEKSEYKMEIDDLSSNMEAVAKAKGNLEKMCRTLEDQLSELKTKNDENVRQVNDISGQRARLLTENGEFGRQLEEKEALVSQ
LTRGKQAFTQQVEELKRLIEEEVKAKNALAHGVQSARHDCDLLREQFEEEQEAKAELQRGMSKANSEVAQWRTKYETDAIQRTEELEEAKKKL
AQRLQEAEETIEATNSKCASLEKTKQRLQGEVEDLMIDVERANALAANLDKKQRNFDKVLAEWKQKYEEGQAELEGAQKEARSMSTELFKMKN
SYEEALDHLETLKRENKNLQQEISDLTEQIGETGKSIHELEKAKKTVETEKSEIQTALEEAEGTLEHEESKILRVQLELNQIKGEVDRKIAEK
DEEMEQIKRNSQRVVDSMQSTLDSEVRSRNDALRVKKKMEGDLNEMEIQLSHSNRQAAEAQKQLRNVQGQLKDAQLHLDDAVRAAEDMKEQAA
MVERRNGLMVAEIEELRVALEQTERGRKVAETELVDASERVGLLHSQNTSLLNTKKKLETDLVQVQGEVDDIVQEARNAEEKAKKAITDAAMM
AEELKKEQDTSSHLERMKKNLEVTVKDLQHRLDEAENLAMKGGKKQLQKLESRVRELETEVEAEQRRGVDAVKGVRKYERRVKELTYQTEEDK
KNVNRLQDLVDKLQMKVKAYKRQAEEAEEAANQHMSKFRKVQHELEEAEERADIAETQVNKLRAKTRDSGKGKEAAE (SEQ ID NO: 7)
>tr|A0A1S3QIZ8|A0A1S3QI28_SALSA myosin heavy chain, fast skeletal muscle-like OS = Salmo
salar OX = 8030 GN = LOC106593168 PE = 3 SV = 1
MSTDAEMQIYGKAAIYLRKSEKERMEAQAAPFDSKNSCYVADKVELYLKGLITARADGKCTVTVTKPDGTKEEGKEFKDADIYEMNPPKYDKI
EDMAMMTYLNEASVLYNLKERYAAWMIYTYSGLFCATVNPYKWLPVYDAEVVNAYRGKKRMEAPPHIFSVSDNAFQFMLIDKENQSVLITGES
GAGKTVNTKRVIQYFATIAVSGGEKKKEVDPSKMQGSLEDQIIAANPLLEAYGNAKTVRNDNSSRFGKFIRIHFQGGKLAKADIETYLLEKSR
VSFQLPDERGYHIFFQMMTGHKPEIVEMALITTNPYDFPMCSQGQIAVASIDDKEELDATDDAITILGFTNDEKIGIYKLTGAVVHHGNLKFK
QKQREEQAEPDGTEVADKIGYLLGLNSAEMLKALCYPRVKVGNEYVTKGQTVPQVNNSVMALAKSIYERMFLWMVIRINEMLDTKNPRQFYIG
VLDIAGFEIFDYNSMEQLCINFTNEKLQQFFNHTMFVLEQEEYKKEGIVWAFIDFGMDLAACIELIEKPLGIFSILEEECMFPKSSDTTFKDK
LYSQHLGKTQAFEKPKPAKGKAEAHFSLVHYAGTVDYNITGWLEKNKDPLNDSVCQLYGKSGVKILAALYPAAPPEDTTKKGGKKKGGSMQTV
SSQFRENLHKLMTNLRSTHPHFVRCLIPNESKTPGLMENFLVIHQLRCNGVLEGIRICRKGFPSRIIYADFKQRYKVLNASVIPEGQFMDNKK
ASEKLLGSIDVNHEDYKFGHTKVSQILYFKIKPLLQSAETEKELANMKENYEKMTADLAKALSTKKQMEEKLVALMQEKNDLALQVAS
(SEQ ID NO: 8)
>sp|A0JNJ5|MYL1_BOVIN Myosin light chain 1/3, skeletal muscle isoform OS = Bos taurus
OX = 9913 GN = MYL1 PE = 2 SV = 1
MAPKKDVKKPAAAAAPAPAPAPAPAPAPAPPKEEKIDLSAIKIEFSKQQQDEFKEAFLLFDRTGECKITLSQVGDVLRALGTNPTNAEVKKVL
GNPSNEEMNAKKIEFEQFLPMLQAISNNKDQGTYEDFVEGLRVFDKEGNGTVMGAELRHVLATLGEKMKEEEVEALMAGQEDSNGCINYEAFV
KHIMSN (SEQ ID NO: 9)
>P02604|MLE1_CHICK Myosin light chain 1, skeletal muscle isoform
MAPKKDVKKPAAAAAPAPAPAPAPAPAPAKPKEPAIDLKSIKIEFSKEQQDDFKEAFLLFDRTGDAKITLSQVGDIVRALGQNPTNAEINKIL
GNPSKEEMNAKKITFEEFLPMLQAAANNKDQGTFEDFVEGLRVFDKEGNGTVMGAELRHVLATLGEKMTEEEVEELMKGQEDSNGCINYEAFV
KHIMSV (SEQ ID NO: 10)
>P02605|MLE3_CHICK Myosin light chain 3, skeletal muscle isoform
MSFSPDEINDFKEAFLLFDRTGDAKITLSQVGDIVRALGQNPTNAEINKILGNPSKEEMNAKKITFEEFLPMLQAAANNKDQGTFEDFVEGLR
VFDKEGNGTVMGAELRHVLATLGEKMTEEEVEELMKGQEDSNGCINYEAFVKHIMSV (SEQ ID NO: 11)
>tr|B5DGT2|B5DGT2_SALSA Myosin light chain 3, skeletal muscle isoform OS = Salmo salar
OX = 8030 GN = MLE3 PE = 2 SV = 1
MADAAPAEASGASAFTADQIEDFKEAFGLFDRVGDSMIGYNQVADVMRALGQNPQNKEVAAILGKPSADDMANKRLAFADFMPMMEKVDKIVK
GTLDDYVEGLRVFDKEGNGTVSGAELRIVLGTLGEKMSEAEIDSLLIGQEDENGSINYEAFVKHVLSV (SEQ ID NO: 12)
>sp|P13538|MYSS_CHICK Myosin heavy chain, skeletal muscle, adult OS = Gallus gallus
OX = 9031 PE = 1 SV = 4
MASPDAEMAAFGEAAPYLRKSEKERIEAQNKPFDAKSSVFVVHPKESFVKGTIQSKEGGKVTVKTEGGETLTVKEDQVFSMNPPKYDKIEDMA
MMTHLHEPAVLYNLKERYAAWMIYTYSGLFCVTVNPYKWLPVYNPEVVLAYRGKKRQEAPPHIFSISDNAYQFMLTDRENQSILITGESGAGK
TVNTKRVIQYFATIAASGEKKKEEQSGKMQGTLEDQIISANPLLEAFGNAKTVRNDNSSREGKFIRIHFGATGKLASADIETYLLEKSRVTFQ
LPAERSYHIFYQIMSNKKPELIDMLLITTNPYDYHYVSQGEITVPSIDDQEELMATDSAIDILGFSADEKTAIYKLTGAVMHYGNLKFKQKQR
EEQAEPDGTEVADKAAYLMGLNSAELLKALCYPRVKVGNEFVTKGQTVSQVHNSVGALAKAVYEKMFLWMVIRINQQLDTKQPRQYFIGVLDI
AGFEIFDFNSFEQLCINFTNEKLQQFFNHHMFVLEQEEYKKEGIEWEFIDFGMDLAACIELIEKPMGIFSILEEECMFPKATDTSFKNKLYDQ
HLGKSNNFQKPKPAKGKAEAHFSLVHYAGTVDYNISGWLEKNKDPLNETVIGLYQKSSVKTLALLFATYGGEAEGGGGKKGGKKKGSSFQTVS
ALFRENLNKLMANLRSTHPHFVRCIIPNETKTPGAMEHELVLHQLRCNGVLEGIRICRKGFPSRVLYADFKQRYRVLNASAIPEGQFMDSKKA
SEKLLGSIDVDHTQYRFGHTKVFFKAGLLGLLEEMRDDKLAEIITRTQARCRGFLMRVEYRRMVERRESIFCIQYNVRSFMNVKHWPWMKLFF
KIKPLLKSAESEKEMANMKEEFEKTKEELAKSEAKRKELEEKMVVLLQEKNDLQLQVQAEADSLADAEERCDQLIKTKIQLEAKIKEVTERAE
DEEEINAELTAKKRKLEDECSELKKDIDDLELTLAKVEKEKHATENKVKNLTEEMAVLDETIAKLTKEKKALQEAHQQTLDDLQVEEDKVNTL
TKAKTKLEQQVDDLEGSLEQEKKLRMDLERAKRKLEGDLKLAHDSIMDLENDKQQLDEKLKKKDFEISQIQSKIEDEQALGMQLQKKIKELQA
RIEELEEEIEAERTSRAKAEKHRADLSRELEEISERLEEAGGATAAQIEMNKKREAEFQKMRRDLEEATLQHEATAAALRKKHADSTAELGEQ
IDNLQRVKQKLEKEKSELKMEIDDLASNMESVSKAKANLEKMCRTLEDQLSEIKTKEEQNQRMINDLNTQRARLQTETGEYSRQAEEKDALIS
QLSRGKQGFTQQIEELKRHLEEEIKAKNALAHALQSARHDCELLREQYEEEQEAKGELQRALSKANSEVAQWRTKYETDAIQRTEELEEAKKK
LAQRLQDAEEHVEAVNAKCASLEKTKQRLQNEVEDLMVDVERSNAACAALDKKQKNFDKILAEWKQKYEETQTELEASQKESRSLSTELFKMK
NAYEESLDHLETLKRENKNLQQEIADLTEQIAEGGKAVHELEKVKKHVEQEKSELQASLEEAEASLEHEEGKILRLQLELNQIKSEIDRKIAE
KDEEIDQLKRNHLRIVESMQSTLDAEIRSRNEALRLKKKMEGDLNEMEIQLSHANRMAAEAQKNLRNTQGTLKDTQIHLDDALRTQEDLKEQV
AMVERRANLLQAEVEELRGALEQTERSRKVAEQELLDATERVQLLHTQNTSLINTKKKLETDIVQIQSEMEDTIQEARNAEEKAKKAITDAAM
MAEELKKEQDTSAHLERMKKNMDQTVKDLHVRLDEAEQLALKGGKKQLQKLEARVRELEGEVDSEQKRSAEAVKGVRKYERRVKELTYQCEED
RKNILRLQDLVDKLQMKVKSYKRQAEEAEELSNVNLSKFRKIQHELEEAEERADIAESQVNKLRVKSREIHGKKIEEEE
(SEQ ID NO: 13)
>Q8AXY6|MUSK_CHICK Muscle, skeletal receptor tyrosine protein kinase
MRDLLVVPLGHVLTLAALSLAETLQKAPFISTPLETVDALVEDVPKFVCVVESYPEPEITWTRNSIPIRLFDTRYSIQRNGQLLTILSVEDSD
DGVYCCTADNGVGAAAQSCGALQVKMRPKITRPPVNVEIIEGLKAVLPCTTMGNPKPSVSWIKGETVVKENARIAVLDSGNLRIHNVQREDAG
QYRCVAKNSLGSAYSKPATVVVEVFARILKAPESQNITFGSMVTLRCTAAGAPVPTVTWLENGKAVSAGSIAESVKDRVVDSRLQVYVTRPGL
FTCLATNKHSKTFGAAKAAATISVSEWSKLYKGDAGYCSTYRGEVCSAILSRNALVFFNSSYADPEETQELLVHTAWTELKTVSSFCQPAAES
LLCNYIFQECKPSGVGPAPKPICRENCLAVKDLYCFKEWLSMEENSQRGIYKPGLMLLALPECNRLPSLHQDPSACTHIPFFDFKKENITRTC
YSGNGQFYQGWANVTASGIPCQKWSDQAPHLHRRTPQVFPELSDAENYCRNPGGENERPWCYTKDPSVTWEYCSVSPCGDASLSLGTRKPNGE
TQNLPPPPSYSPTYSMNVIILIISSFALIVILGIITLVCCRRRKQWKNKKRESETPTLTTLPSELLLDRLHPNPMYQRMPLLLNPKLLSLEYP
RNNIEYVRDIGEGAFGRVFQARAPGLLPYEPFTMVAVKMLKEEASADMQADFQREAALMAEFDNPNIVKLLGVCAVGKPMCLLFEYMAYGDLN
EYLRDRSPRNLCSLVQGGLEARACLLNPLALCCTSQLCIAKQVAAGMAYLSERKFVHRDLATRNCLVGENMVVKIADFGLSRNMYSADYYKAN
ENDAIPIRWMPPESIFYNRYTTESDVWAYGVVLWEIFSYGMQPYYGMAHEEVIYYVRDGNILSCPDNCPLELYNLMRLCWSKLPADRPSFASI
HRILERMYERAVASPQV (SEQ ID NO: 14)
>P02588|TNNC2_CHICK Troponin C, skeletal muscle
MASMTDQQAEARAFLSEEMIAEFKAAFDMFDADGGGDISTKELGTVMRMLGQNPTKEELDAIIEEVDEDGSGTIDFEEFLVMMVRQMKEDAKG
KSEEELANCFRIFDKNADGFIDIEELGEILRATGEHVTEEDIEDLMKDSDKNNDGRIDFDEFLKMMEGVQ (SEQ ID NO: 15)
>sp|P02587|TNNC2_PIG Troponin C, skeletal muscle OS = Sus scrofa OX = 9823 GN = TNNC2 PE = 1
SV = 2
TDQQAEARSYLSEEMIAEFKAAFDMFDADGGGDISVKELGTVMRMLGQTPTKEELDAIIEEVDEDGSGTIDFEEFLVMMVRQMKEDAKGKSEE
ELAECFRIFDRNMDGYIDAEELAEIFRASGEHVTDEEIESIMKDGDKNNDGRIDFDEFLKMMEGVQ (SEQ ID NO: 16)
>sp|P68246|TNNI2_CHICK Troponin I, fast skeletal muscle OS = Gallus gallus OX = 9031
GN = TNNI2 PE = 1 SV = 2
MSDEEKKRRAATARRQHLKSAMLQLAVTEIEKEAAAKEVEKQNYLAEHCPPLSLPGSMQELQELCKKLHAKIDSVDEERYDTEVKLQKTNKEL
EDLSQKLFDLRGKFKRPPLRRVRMSADAMLRALLGSKHKVNMDLRANLKQVKKEDTEKEKDLRDVGDWRKNIEEKSGMEGRKKMFEAGES
(SEQ ID NO: 17)
>sp|Q8MKI3|TNNT3_BOVIN Troponin T, fast skeletal muscle OS = Bos taurus OX = 9913 GN = Tnnt3
PE = 2 SV = 1
MSDEEVEHVEEEYEEEEEAQEEAPPPPAEVPEVHEEVHEVHEPEEVQEEEKPRPRLTAPKIPEGEKVDFDDIQKKRQNKDLMELQALIDSHFE
ARKKEEEELVALKERIEKRRAERAEQQRIRAEKERERQNRLAEEKARREEEDAKRRAEDDLKKKKALSSMGANYSSYLAKADQKRGKKQTARE
MKKKVLAERRKPLNIDHLSEDKLRDKAKELWDTLYQLETDKFEYGEKLKRQKYDITNLRSRIDQAQKHSKKAGTAPKGKVGGRWK
(SEQ ID NO: 18)
>sp|Q75ZZ6|TNNT1_PIG Troponin T, slow skeletal muscle OS = Sus scrofa OX = 9823 GN = TNNT1
PE = 2 SV = 3
MSDAEEQEYEEEQPEEEEAAEEEEAPEEPEPVAEREEERPKPSRPVVPPLIPPKIPEGERVDFDDIHRKRMEKDLLELQTLIDVHFEQRKKEE
EELVALKERIERRRAERAEQQRFRTEKERERQAKLAEEKMRKEEEEAKKRAEDDAKKKKVLSNMGAHFGGYLVKAEQKRGKRQTGREMKQRIL
SERKKPLNIDHMGEDQLREKAQELSDWIHQLESEKFDLMAKLKQQKYEINVLYNRISHAQKFRKGAGKGRVGGRWK (SEQ ID NO: 19)
>NP_990105.1 tropomodulin-4 [Gallusgallus]
MTSYRQELEKYRDIDEDKILQELSAEELEQLDTELLEMDPENVLLPAGLRQRDQTQKSPTGPLDREALLQHLEKQALEAKEREDLVPFTGEKK
GKPFVPKNPTREIPREEQITLEPELEEALANATEAEMCDIAAILGMYTLMSNKQYYDAICSGTITNTEGINSVVKPDKYKPVPDEPPNPTNVE
ETLRQIQANDSALEDVNLNNIKDIPISTLKAICEAMKTNTHVKKLSLVATRSNDPVATAVAEMLAENKTLQSLNIESNFITSAGMMSVIKAMY
QNSTLSELKVDNQCQRLGNTVEMEMATMLEQCPSVVRFGYHFTQQGPRARAAIAITRNNELRRKQKKT (SEQ ID NO: 20)
>P68139|ACTS_CHICK Alpha-actin-1
MCDEDETTALVCDNGSGLVKAGFAGDDAPRAVFPSIVGRPRHQGVMVGMGQKDSYVGDEAQSKRGILTLKYPIEHGIITNWDDMEKIWHHTFY
NELRVAPEEHPTLLTEAPLNPKANREKMTQIMFETFNVPAMYVAIQAVLSLYASGRTTGIVLDSGDGVTHNVPIYEGYALPHAIMRLDLAGRD
LTDYLMKILTERGYSFVTTAEREIVRDIKEKLCYVALDFENEMATAASSSSLEKSYELPDGQVITIGNERFRCPETLFQPSFIGMESAGIHET
TYNSIMKCDIDIRKDLYANNVMSGGTTMYPGIADRMQKEITALAPSTMKIKIIAPPERKYSVWIGGSILASLSTFQQMWITKQEYDEAGPSIV
HRKCF (SEQ ID NO: 21)
>P20111|ACTN2_CHICK Alpha-actinin-2
MNSMNQIETNMQYTYNYEEDEYMTQEEEWDRDLLLDPAWEKQQRKTFTAWCNSHLRKAGTQIENIEEDFRNGLKLMLLLEVISGERLPKPDRG
KMRFHKIANVNKALDYIASKGVKLVSIGAEEIVDGNVKMTLGMIWTIILRFAIQDISVEETSAKEGLLLWCQRKTAPYRNVNIQNFHLSWKDG
LGLCALIHRHRPDLIDYSKLNKDDPIGNINLAMEIAEKHLDIPKMLDAEDIVNTPKPDERAIMTYVSCFYHAFAGAEQAETAANRICKVLAVN
QENERLMEEYERLASELLEWIRRTIPWLENRTPEKTMQAMQKKLEDFRDYRRKHKPPKVQEKCQLEINFNTLQTKLRISNRPAFMPSEGKMVS
DIAGAWQRLEQAEKGYEEWLLNEIRRLERLEHLAEKFRQKASTHEQWAYGKEQILLQKDYESASLTEVRAMLRKHEAFESDLAAHQDRVEQIA
AIAQELNELDYHDAASVNDRCQKICDQWDSLGTLTQKRREALERTEKLLETIDQLHLEFAKRAAPFNNWMEGAMEDLQDMFIVHSIEEIQSLI
SAHDQFKATLPEADGERQAILSIQNEVEKVIQSYSMRISASNPYSTVTVEEIRTKWEKVKQLVPQRDQSLQEELARQHANERLRRQFAAQANV
IGPWIQTKMEEIARSSIEMTGPLEDQMNQLKQYEQNIINYKHNIDKLEGDHQLIQEALVFDNKHTNYTMEHIRVGWELLLTTIARTINEVETQ
ILTRDAKGITQEQMNDFRASFNHFDRRKNGLMDHDDFRACLISMGYDLGEAEFARIMSLVDPNGQGTVTFQSFIDFMTRETADTDTAEQVIAS
FRILASDKPYILADELRRELPPEQAQYCIKRMPQYTGPGSVPGALDYTSFSSALYGESDL (SEQ ID NO: 22)
>sp|P20111-2|ACTN2_CHICK Isoform 2 of Alpha-actinin-2 OS = Gallus gallus OX = 9031 GN = ACTN2
MNSMNQIETNMQYTYNYEEDEYMTQEEEWDRDLLLDPAWEKQQRKTFTAWCNSHLRKAGTQIENIEEDFRNGLKLMLLLEVISGERLPKPDRG
KMRFHKIANVNKALDYIASKGVKLVSIGAEEIVDGNVKMTLGMIWTIILRFAIQDISVEETSAKEGLLLWCQRKTAPYRNVNIQNFHLSWKDG
LGLCALIHRHRPDLIDYSKLNKDDPIGNINLAMEIAEKHLDIPKMLDAEDIVNTPKPDERAIMTYVSCFYHAFAGAEQAETAANRICKVLAVN
QENERLMEEYERLASELLEWIRRTIPWLENRTPEKTMQAMQKKLEDFRDYRRKHKPPKVQEKCQLEINFNTLQTKLRISNRPAFMPSEGKMVS
DIAGAWQRLEQAEKGYEEWLLNEIRRLERLEHLAEKFRQKASTHEQWAYGKEQILLQKDYESASLTEVRAMLRKHEAFESDLAAHQDRVEQIA
AIAQELNELDYHDAASVNDRCQKICDQWDSLGTLTQKRREALERTEKLLETIDQLHLEFAKRAAPFNNWMEGAMEDLQDMFIVHSIEEIQSLI
SAHDQFKATLPEADGERQAILSIQNEVEKVIQSYSMRISASNPYSTVTVEEIRTKWEKVKQLVPQRDQSLQEELARQHANERLRRQFAAQANV
IGPWIQTKMEEIARSSIEMTGPLEDQMNQLKQYEQNIINYKHNIDKLEGDHQLIQEALVFDNKHTNYTMEHIRVGWELLLTTIARTINEVETQ
ILTRDAKGITQEQMNDFRASFNHFDRRKNGLMDHDDFRACLISMGYDLDESDNLHSDEFKACLISLGEVGNDLQGEAEFARIMSLVDPNGQGT
VTFQSFIDFMTRETADTDTAEQVIASFRILASDKPYILADELRRELPPEQAQYCIKRMPQYTGPGSVPGALDYTSFSSALYGESDL
(SEQ ID NO: 23)
>sp|P13127|CAZA1_CHICK F-actin-capping protein subunit alpha-1 OS = Gallus gallus OX = 9031
GN = CAPZA1 PE = 1 SV = 1
MADFEDRVSDEEKVRIAAKFITHAPPGEFNEVFNDVRLLLNNDNLLREGAAHAFAQYNMDQFTPVKIEGYDDQVLITEHGDLGNGRFLDPRNK
ISFKFDHLRKEASDPQPEDTESALKQWRDACDSALRAYVKDHYPNGFCTVYGKSIDGQQTIIACIESHQFQPKNFWNGRWRSEWKFTITPPTA
QVAAVLKIQVHYYEDGNVQLVSHKDIQDSVQVSSDVQTAKEFIKIIENAENEYQTAISENYQTMSDTTFKALRRQLPVTRTKIDWNKILSYKI
GKEMQNA (SEQ ID NO: 24)
>sp|P28497|CAZA2_CHICK F-actin-capping protein subunit alpha-2 OS = Gallus gallus OX = 9031
GN = CAPZA2 PE = 1 SV = 1
MADLEEQLSDEEKVRIAAKFIIHAPPGEFNEVFNDVRLLLNNDNLLREGAAHAFAQYNLDQFTPVKIDGYDEQVLITEHGDLGNGKFLDPKNK
ISFKFDHLRKEATDPRPHEVENAIESWRNSVETAMKAYVKEHYPNGVCTVYGKTIDGQQTIIACIESHQFQAKNEWNGRWRSEWKFTISPSTT
QVAGILKIQVHYYEDGNVQLVSHKDIQDSLTVSNEAQTAKEFIKIVEAAENEYQTAISENYQTMSDTTFKALRRQLPVTRTKIDWNKILSYKI
GKEMQNA (SEQ ID NO: 25)
>tr|A0M8U0|A0M8U0_CHICK Capping protein (Actin filament) muscle Z-line, alpha 2 OS = Gallus
gallus OX = 9031 GN = CAPZA2 PE = 3 SV = 1
MADLEEQLSDEEKVRIAAKFIIHAPPGEFNEVFNDVRLLLNNDNLLREGAAHAFAQYNLDQFTPVKIDGYDEQVLITEHGDLGNGKFLDPKNK
ISFKFDHLRKEATDPRPHEVENAIESWRNSVETAMKAYVKEHYPNGVCTVYGKTIDGQQTIIACIESHQFQAKNFWNGRWRSEWKFTISPSTT
QVAGILKIQVHYYEDGNVQLVSHKDIQDSLTVSNEAQTAKEFIKIVEAAENEYQTAISENYQTMSDTTFKALRRQLPVTRTKIDWNKILSYKI
GKEMQNA (SEQ ID NO: 26)
>NP_001265047.1 F-actin-capping protein subunit alpha-3 [Gallus gallus]
MSVGQGLCESEKVSLICGLMRQSPPGEFRQVVQDLCDLLQDDELVKQQAARAGARHNKNNFTPVLVNGNTVLLTQYNDLGGNRFFYPQDKFSF
EFDHLSGVTSKTHLHRVMLDEGELWRGALHKGLNAYVNYHFPVGNCCVFKKSLGKRQMLVACIEAHQYQPSKHWNSLWKSDWTFSLTPVMTRV
TGIFLLQLHYFRNANLHVTISKSVSESLHVIDRNQFVTDFVKFVKTEDNKIHNAILENIQALSEHTWRKNLRRRLPITRTFMNWNELLNNQHL
KTGVSRKEVPP (SEQ ID NO: 27)
>P02565|MYH1B_CHICK Myosin-1B
MATDADMAIFGEAAPYLRKSEKERIEAQNKPFDAKSSVFVVHAKESYVKSTIQSKESGKVTVKTEGGETLTVKEDQIFSMNPPKYDKIEDMAM
MTHLHEPAVLYNLKERYAAWMIYTYSGLFCVTVNPYKWLPVYNPEVVLAYRGKKRQEAPPHIFSISDNAYQFMLTDRENQSILITGESGAGKT
VNTKRVIQYFATIAASGDKKKEEQPAGKMQGTLEDQIISANPLLEAFGNAKTVRNDNSSREGKFIRIHFGATGKLASADIETYLLEKSRVTFQ
LKAERSYHIFYQIMSNKKPELIEMLLITTNPYDYQYVSQGEITVPSINDQEELMATDSAIDILGFTPDEKTAIYKLTGAVMHYGNLKFKQKQR
EEQAEPGGTEVADKAAYLMGLNSADLLKALCYPRVKVGNEYVTKGQTVQQVYNSVGALAKSVFEKMFLWMVVRINQQLDTKQPRQYFIGVLDI
AGFEIFDFNSLEQLCINFTNEKLQQFFNHHMFVLEQEEYKKEGIEWEFIDFGMDLAACIELIEKPMGIFSILEEECMFPKATDTSFKNKLYDQ
HLGKSNNFQKPKPGKGKAEAHFSLVHYAGTVDYNITGWLEKNKDPLNETVVGLYQKSSLKTLALLFASVGGAEAESGAGGKKGGKKKGSSFQT
VSALFRENLNKLMSNLRSTHPHFVRCLIPNETKTPGAMEHELVLHQLRCNGVLEGIRICRKGFPIRILYADFKQRYKVLNASAIPEGQFIDSK
KASEKLLGSIDVDHTQYKFGHTKVFFKAGLLGLLEEMRDEKLAQLITRTQARCRGFLMRVEFKKMMERRESIFCIQYNVRAFMNVKHWPWMKL
FFKIKPLLKSAESEKEMANMKEEFEKTKEELAKSEAKRKELEEKMVSLLQEKNDLQLQVQAEADGLADAEERCDQLIKTKIQLEAKIKELTER
AEDEEEMNAELTAKKRKLEDECSELKKDIDDLELTLAKVEKEKHATENKVKNLTEEMAALDETIAKLTKEKKALQEAHQQTLDDLQAEEDKVN
TLTKAKTKLEQQVDDLEGSLEQEKKLRMDLERAKRKLEGDLKMTQESTMDLENDKQQLDEKLKKKDFEISQIQSKIEDEQALGMQLQKKIKEL
QARIEELEEEIEAERTSRAKAEKHRADLSRELEEISERLEEAGGATAAQIDMNKKREAEFQKMRRDLEEATLQHEATAAALRKKHADSTADVG
EQIDNLQRVKQKLEKEKSELKMEIDDLASNMESVSKAKANLEKMCRSLEDQLSEIKTKEEEQQRTINDISAQKARLQTESGEYSRQVEEKDAL
ISQLSRGKQAFTQQIEELKRHLEEEIKAKKCPAHALQSARHDCDLLREQYEEEQEAKGELQRALSKANSEVAQWRTKYETDAIQRTEELEEAK
KKLAQRLQDAEEHVEAVNSKCASLEKTKQRLQNEVEDLMIDVERSNAACAALDKKQKNEDKILSEWKQKYEETQAELEASQKESRSLSTELFK
MKNAYEESLDHLETLKRENKNLQQEISDLTEQIAEGGKAIHELEKVKKQIEQEKSELQTALEEAEASLEHEEGKILRVQLELNQVKSDIDRKI
AEKDEEIDQLKRNHLRVVDSMQSTLDAEIRSRNEALRLKKKMEGDLNEIEIQLSHANRQAAEAQKNLRNTQGVLKDTQIHLDDALRSQEDLKE
QVAMVERRANLLQAEIEELRAALEQTERSRKVAEQELLDASERVQLLHTQNTSLINTKKKLESDISQIQSEMEDTIQEARNAEEKAKKAITDA
AMMAEELKKEQDTSAHLERMKKNLDQTVKDLQHRLDEAEQLALKGGKKQIQKLEARVRELEGEVDAEQKRSAEAVKGVRKYERRVKELTYQSE
EDRKNVLRLQDLVDKLQMKVKSYKRQAEEAEELSNVNLSKFRKIQHELEEAEERADIAESQVNKLRAKSREIGKKAESEE
(SEQ ID NO: 28)
>sp|Q9TV63|MYH2_PIG Myosin-2 OS = Sus scrofa OX = 9823 GN = MYH2 PE = 2 SV = 1
MSSDQEMAIFGEAAPYLRKSEKERIEAQNRPFDAKTSVFVAEPKESFVKGTIQSREGGKVTVKTEAGATLTVKEDQVFPMNPPKFDKIEDMAM
MTHLHEPGVLYNLKERYAAWMIYTYSGLFCVTVNPYKWLPVYNPEVVTAYRGKKRQEAPPHIFSISDNAYQFMLTDRENQSILITGESGAGKT
VNTKRVIQYFATIAVTGEKKKEEPTSGKMQGTLEDQIISANPLLEAFGNAKTVRNDNSSRFGKFIRIHFGTTGKLASADIETYLLEKSRVTFQ
LKAERSYHIFYQITSNRKPELIEMLLITTNPYDYPFISQGEISVASIDDQEELIATDSAIDILGFTNEEKVSIYKLTGAVMHYGNLKFKQKQR
EEQAEPDGTEVADKAAYLQSLNSADLLKALCYPRVKVGNEYVTKGQTVEQVTNAVGALAKAVYEKMFLWMVTRINQQLDTKQPRQYFIGVLDI
AGFEIFDENSLEQLCINFTNEKLQQFFNHHMFVLEQEEYKREGIEWTFIDEGMDLAACIELIEKPMGIFSILEEECMFPKATDTSFKNKLYEQ
HLGKSANFQKPKPAKGKVEAHFSLIHYAGTVDYNITGWLDKNKDPLNDTVVGLYQKSALKTLAFLFSGAQTGEAEAGGTKKGGKKKGSSFQTV
SALFRENLNKLMTNLRSTHPHFVRCIIPNETKTPGAMEHELVLHQLRCNGVLEGIRICRKGFPSRILYADFKQRYKVLNASAIPEGQYIDSKK
ASEKLLASIDIDHTQYKFGHTKVFFKAGLLGLLEEMRDDKLAQLITRTQARCRGFLARVEYQKMVERRESIFCIQYNIRAFMNVKHWPWMKLF
FKIKPLLKSAESEKEMATMKEEFQKTKDELAKSEAKRKELEEKMVTLLKEKNDLQLQVQAEAEGLADAEERCDQLIKTKIQLEAKIKEVTERA
EDEEEINAELTAKKRKLEDECSELKKDIDDLELTLAKVEKEKHATENKVKNLTEEMAGLDETIAKLTKEKKALQEAHQQTLDDLQAEEDKVNT
LTKAKTKLEQQVDDLEGSLEQEKKLRMDLERAKRKLEGDLKLAQESIMDIENEKQQLDEKLKKKEFEISNLQSKIEDEQALAIQLQKKIKELQ
ARIEELEEEIEAERASRAKAEKQRSDLSRELEEISERLEEAGGATSAQIEMNKKREAEFQKMRRDLEEATLQHEATAAALRKKHADSVAELGE
QIDNLQRVKQKLEKEKSEMKMEIDDLASNMETVSKAKGNLEKMCRTLEDQLSELKSKEEEQQRLINDLTAQRGRLQTESGEFSRQLDEKEALV
SQLSRGKQAYTQQIEELKRQLEEEIKAKNALAHALQSSRHDCDLLREQYEEEQESKAELQRALSKANTEVAQWRTKYETDAIQRTEELEEAKK
KLAQRLQAAEEHVEAVNAKCASLEKTKQRLQNEVEDLMLDVERTNAACAALDKKQRNFDKILAEWKQKYEETHAELEASQKEARSLGTELFKM
KNAYEESLDQLETLKRENKNLQQEISDLTEQIAEGGKRIHELEKIKKQVEQEKSEIQAALEEAEASLEHEEGKILRIQLELNQVKSEVDRKIA
EKDEEIDQLKRNHVRVVESMQSMLDAEIRSRNDAIRLKKKMEGDLNEMEIQLNHANRMAAEALRNYRNTQGILKDTQIHLDDALRGQEDLKEQ
LAMVERRANLLQAEIEELRATLEQTERSRKVAEQELLDASERVQLLHTQNTSLINTKKKLETDISQMQGEMEDILQEARNAEEKAKKAITDAA
MMAEELKKEQDTSAHLERMKKNMEQTVKDLQHRLDEAEQLALKGGKKQIQKLEARVRELEGEVESEQKRNAEAVKGLRKHERRVKELTYQTEE
DRKNILRLQDLVDKLQAKVKSYKRQAEEAEEQSNTNLSKFRKLQHELEEAEERADIAESQVNKLRVKSREVHTKVISEE
(SEQ ID NO: 29)
>sp|Q9TV62|MYH4_PIG Myosin-4 OS = Sus scrofa OX = 9823 GN = MYH4 PE = 2 SV = 1
MSSDQEMAIFGEAAPYLRKSEKERIEAQNKPFDAKTSVFVAEPKESFVKGTVQSREGGKVTVKTEAGATLTVKEDQVFPMNPPKFDKIEDMAM
MTHLHEPAVLYNLKERYAAWMIYTYSGLFCVTVNPYKWLPVYNAEVVTAYRGKKRQEAPPHIFSISDNAYQFMLTDRENQSILITGESGAGKT
VNTKRVIQYFATIAVTGEKKKEEPTPGKMQGTLEDQIISANPLLEAFGNAKTVRNDNSSRFGKFIRIHFGTTGKLASADIETYLLEKSRVTFQ
LKAERSYHIFYQIMSNKKPELIEMLLITTNPYDYAFVSQGEITVPSIDDQEELMATDSAIEILGFTSDERVSIYKLTGAVMHYGNLKFKQKQR
EEQAEPDGTEVADKAAYLQGLNSADLLKALCYPRVKVGNEFVTKGQTVQQVYNAVGALAKAVYDKMFLWMVTRINQQLDTKQPRQYFIGVLDI
AGFEIFDFNSLEQLCINFTNEKLQQFFNHHMFVLEQEEYKKEGIEWEFIDEGMDLAACIELIEKPMGIFSILEEECMFPKATDTSFKNKLYEQ
HLGKSNNFQKPKPAKGKAEAHFSLIHYAGTVDYNITGWLDKNKDPLNETVVGLYQKSSVKTLAFLFAERQSSEEGGTKKGGKKKGSSFQTVSA
LFRENLNKLMTNLRSTHPHFVRCIIPNETKTPGAMEHELVLHQLRCNGVLEGIRICRKGFPSRILYADFKQRYKVLNASAIPEGQFIDSKKAS
EKLLGSIDIDHTQYKFGHTKVFFKAGLLGTLEEMRDEKLAQLITRTQAMCRGFLMRVEFRKMMERRESIFCIQYNIRAFMNVKHWPWMKLYFK
IKPLLKSAETEKEMANMKEEFEKTKEDLAKSEAKRKELEEKMVALMQEKNDLQLQVQAEADGLADAEERCDQLIKTKIQLEAKIKEVTERAED
EEEINAELTAKKRKLEDECSELKKDIDDLELTLAKVEKEKHATENKVKNLTEEMAGLDENIAKLTKEKKALQEAHQQTLDDLQAEEDKVNTLT
KAKTKLEQQVDDLEGSLEQEKKLRMDLERAKRKLEGDLKLAQESTMDIENDKQQLDEKLKKKEFEMSNLQSKIEDEQALAMQLQKKIKELQAR
TEELEEEIEAERASRAKAEKQRSDLSRELEEISERLEEAGGATSAQIEMNKKREAEFQKMRRDLEEATLQHEATAAALRKKHADSVAELGEQI
DNLQRVKQKLEKEKSELKMEIDDLASNMETVSKAKGNLEKMCRTLEDQLSEVKTKEEEHQRLINELSAQKARLQTESGEFSRQLDEKEALVSQ
LSRGKQAFTQQIEELKRQLEEETKAKSALAHAVQSSRHDCDLLREQYEEEQEAKAELQRAMSKANSEVAQWRTKYETDAIQRTEELEEAKKKL
AQRLQDAEEHVEAVNAKCASLEKTKQRLQNEVEDLMLDVERSNAACAALDKKQRNFDKILAEWKHKYEETQAELEASQKESRSLSTELFKVKN
AYEESLDQLETLKRENKNLQQEISDLTEQIAEGGKHIHELEKVKKQIEQEKSELQAALEEAEASLEHEEGKILRIQLELNQVKSEIDRKIAEK
DEEIDQMKRNHIRVVESMQSTLDAEIRSRNDALRIKKKMEGDLNEMEIQLNHANRQATEAIRNLRNTQGVLKDTQLHLDDAIRGQDDLKEQLA
MVERRANLMQAEIEELRASLEQTERSRRVAEQELLDASERVQLLHTQNTSLINTKKKLETDISQIQGEMEDIVQEARNAEEKAKKAITDAAMM
AEELKKEQDTSAHLERMKKNMEQTVKDLQHRLDEAEQLALKGGKKQIQKLEARVRELENEVENEQKRNVEAVKGLRKHERRVKELTYQTEEDR
KNVLRLQDLVDKLQSKVKAYKRQAEEAEEQSNVNLSKFRKLQHELEEAEERADIAESQVNKLRVKSREVHTKVISEE (SEQ ID NO: 30)
>sp|P02565|MYH1B_CHICK Myosin-1B OS = Gallus gallus OX = 9031 GN = MYH1B PE = 2 SV = 3
MATDADMAIFGEAAPYLRKSEKERIEAQNKPFDAKSSVFVVHAKESYVKSTIQSKESGhKVTVKTEGGETLTVKEDQIFSMNPPKYDKIEDMA
MMTHLHEPAVLYNLKERYAAWMIYTYSGLFCVTVNPYKWLPVYNPEVVLAYRGKKRQEAPPHIFSISDNAYQFMLTDRENQSILITGESGAGK
TVNTKRVIQYFATIAASGDKKKEEQPAGKMQGTLEDQIISANPLLEAFGNAKTVRNDNSSRFGKFIRIHFGATGKLASADIETYLLEKSRVTF
QLKAERSYHIFYQIMSNKKPELIEMLLITTNPYDYQYVSQGEITVPSINDQEELMATDSAIDILGFTPDEKTAIYKLTGAVMHYGNLKFKQKQ
REEQAEPGGTEVADKAAYLMGLNSADLLKALCYPRVKVGNEYVTKGQTVQQVYNSVGALAKSVFEKMFLWMVVRINQQLDTKQPRQYFIGVLD
IAGFEIFDFNSLEQLCINFTNEKLQQFFNHHMFVLEQEEYKKEGIEWEFIDFGMDLAACIELIEKPMGIFSILEEECMFPKATDTSFKNKLYD
QHLGKSNNFQKPKPGKGKAEAHFSLVHYAGTVDYNITGWLEKNKDPLNETVVGLYQKSSLKTLALLFASVGGAEAESGAGGKKGGKKKGSSFQ
TVSALFRENLNKLMSNLRSTHPHFVRCLIPNETKTPGAMEHELVLHQLRCNGVLEGIRICRKGFPIRILYADFKQRYKVLNASAIPEGQFIDS
KKASEKLLGSIDVDHTQYKFGHTKVFFKAGLLGLLEEMRDEKLAQLITRTQARCRGFLMRVEFKKMMERRESIFCIQYNVRAFMNVKHWPWMK
LFFKIKPLLKSAESEKEMANMKEEFEKTKEELAKSEAKRKELEEKMVSLLQEKNDLQLQVQAEADGLADAEERCDQLIKTKIQLEAKIKELTE
RAEDEEEMNAELTAKKRKLEDECSELKKDIDDLELTLAKVEKEKHATENKVKNLTEEMAALDETIAKLTKEKKALQEAHQQTLDDLQAEEDKV
NTLTKAKTKLEQQVDDLEGSLEQEKKLRMDLERAKRKLEGDLKMTQESTMDLENDKQQLDEKLKKKDFEISQIQSKIEDEQALGMQLQKKIKE
LQARIEELEEEIEAERTSRAKAEKHRADLSRELEEISERLEEAGGATAAQIDMNKKREAEFQKMRRDLEEATLQHEATAAALRKKHADSTADV
GEQIDNLQRVKQKLEKEKSELKMEIDDLASNMESVSKAKANLEKMCRSLEDQLSEIKTKEEEQQRTINDISAQKARLQTESGEYSRQVEEKDA
LISQLSRGKQAFTQQIEELKRHLEEEIKAKKCPAHALQSARHDCDLLREQYEEEQEAKGELQRALSKANSEVAQWRTKYETDAIQRTEELEEA
KKKLAQRLQDAEEHVEAVNSKCASLEKTKQRLQNEVEDLMIDVERSNAACAALDKKQKNFDKILSEWKQKYEETQAELEASQKESRSLSTELF
KMKNAYEESLDHLETLKRENKNLQQEISDLTEQIAEGGKAIHELEKVKKQIEQEKSELQTALEEAEASLEHEEGKILRVQLELNQVKSDIDRK
IAEKDEEIDQLKRNHLRVVDSMQSTLDAEIRSRNEALRLKKKMEGDLNEIEIQLSHANRQAAEAQKNLRNTQGVLKDTQIHLDDALRSQEDLK
EQVAMVERRANLLQAEIEELRAALEQTERSRKVAEQELLDASERVQLLHTQNTSLINTKKKLESDISQIQSEMEDTIQEARNAEEKAKKAITD
AAMMAEELKKEQDTSAHLERMKKNLDQTVKDLQHRLDEAEQLALKGGKKQIQKLEARVRELEGEVDAEQKRSAEAVKGVRKYERRVKELTYQS
EEDRKNVLRLQDLVDKLQMKVKSYKRQAEEAEELSNVNLSKFRKIQHELEEAEERADIAESQVNKLRAKSREIGKKAESEE
(SEQ ID NO: 31)
>sp|Q9TV61|MYH1_PIGM yosin-1 OS = Sus scrofa OX = 9823 GN = MYH1 PE = 2 SV = 1
MSSDQEMAIFGEAAPYLRKSEKERIEAQNKPFDAKTSVFVAEPKESFVKGTVQSREGGKVTVKTEAGATLTVKEDQVFPMNPPKFDKIEDMAM
MTHLHEPAVLYNLKERYAAWMIYTYSGLFCVTVNPYKWLPVYNAEVVTAYRGKKRQEAPPHIFSISDNAYQFMLTDRENQSILITGESGAGKT
VNTKRVIQYFATIAVTGEKKKEEPTSGKMQGTLEDQIISANPLLEAFGNAKTVRNDNSSRFGKFIRIHFGTTGKLASADIETYLLEKSRVTFQ
LKAERSYHIFYQIMSNKKPELIEMLLITTNPYDYAFVSQGEITVPSIDDQEELMATDSAIEILGFTSDERVSIYKLTGAVMHYGNLKFKQKQR
EEQAEPDGTEVADKAAYLQGLNSADLLKALCYPRVKVGNEFVTKGQTVQQVYNAVGALAKAVYDKMFLWMVTRINQQLDTKQPRQYFIGVLDI
AGFEIFDENSLEQLCINFTNEKLQQFFNHHMFVLEQEEYKKEGIEWEFIDFGMDLAACIELIEKPMGIFSILEEECMFPKATDTSFKNKLYEQ
HLGKSNNFQKPKPAKGKVEAHFSLIHYAGTVDYNITGWLDKNKDPLNETVVGLYQKSSVKTLAFLFTGAAGADAEAGGGKKGGKKKGSSFQTV
SALFRENLNKLMTNLRSTHPHEVRCIIPNETKTPGAMEHELVLHQLRCNGVLEGIRICRKGEPSRILYADFKQRYKVLNASAIPEGQFIDSKK
ASEKLLGSIDIDHTQYKFGHTKVFFKAGLLGLLEEMRDEKLAQLITRTQARCRGFLARVEYQKMVERRESIFCIQYNIRAFMNVKHWPWMKLY
FKIKPLLKSAETEKEMANMKEEFEKTKESLAKAEAKRKELEEKMVALMQEKNDLQLQVQAEADSLADAEERCDQLIKTKIQLEAKIKEVTERA
EDEEEINAELTAKKRKLEDECSELKKDIDDLELTLAKVEKEKHATENKVKNLTEEMAGLDETIAKLTKEKKALQEAHQQTLDDLQAEEDKVNT
LTKAKTKLEQQVDDLEGSLEQEKKLRMDLERAKRKLEGDLKLAQESTMDIENDKQQLDEKLKKKEFEMSNLQSKIEDEQALAMQLQKKIKELQ
ARIEELEEEIEAERASRAKAEKQRSDLSRELEEISERLEEAGGATSAQIEMNKKREAEFQKMRRDLEEATLQHEATAATLRKKHADSVAELGE
QIDNLQRVKQKLEKEKSEMKMEIDDLASNMETVSKAKGNLEKMCRTLEDQLSELKTKEEEQQRLINDLTAQRARLQTESGEYSRQLDEKDTLV
SQLSRGKQAFTQQIEELKRQLEEEIKAKSALAHAVQSSRHDCDLLREQYEEEQEAKAELQRAMSKANSEVAQWRTKYETDAIQRTEELEEAKK
KLAQRLQDAEEHVEAVNAKCASLEKTKQRLQNEVEDLMIDVERSNAACAALDKKQRNFDKILAEWKQKYEETHAELEASQKESRSLSTELFKV
KNAYEESLDQLETLKRENKNLQQEISDLTEQIAEGGKRIHELEKIKKQVEQEKSEIQAALEEAEASLEHEEGKILRIQLELNQVKSEVDRKIA
EKDEEIDQLKRNHVRVVESMQSMLDAEIRSRNDAIRLKKKMEGDLNEMEIQLNHANRMAAEALRNYRNTQGILKDTQIHLDDALRSQEDLKEQ
LAMVERRANLLQAEIEELRATLEQTERSRKVAEQELLDASERVQLLHTQNTSLINTKKKLETDISQIQGEMEDIIQEARNAEEKAKKAITDAA
MMAEELKKEQDTSAHLERMKKNLEQTVKDLQHRLDEAEQLALKGGKKQIQKLEARVRELEGEVESEQKRNVETVKGLRKHERRVKELTYQTEE
DRKNILRLQDLVDKLQAKVKSYKRQAEEAEEQSNVNLSKFRKLQHELEEAEERADIAESQVNKLRVKSREVHTKIISEE
(SEQ ID NO: 32)
>tr|Q9DGM4|Q9DGM4_CHICK Fast myosin heavy chain isoform 3 OS = Gallus gallus OX = 9031
PE = 2 SV = 1
MASSDAEMAAFGEAAPYHRKSEKERIEAQNKPFDAKSSVEVAHPKESFVKGTIQSRETGKVTVKTEGGETLTVKEDQVFSMNPPKYDKIEDMA
MMTHLHEPAVLYNLKERYAAWMIYTYSGLFCVTVNPYKWLPVYNPEVVLAYRGKKRQEAPPHIFSISDNAYQFMLTDRENQSILITGESGAGK
TVNTKRVIQYFATIAASGEKKKEEQSGKMQGTLEDQIISANPLLEAFGNAETVRNDNSSRFGKFIRIHFGATGKLASADIETYLLEKSRVTFQ
LKAERSYHIFYQIMSNKKPELIDMLLITTNPYDYHFVSQGEITVPSIDDQEELMATDSAIDILGFTADEKTAISKLTGAVMHYGNLKFKQKQR
EEQAEPDGTEVADKAAYLMGLNSADLLKALCYPRVKVGNEYVTKGQTVQQVHNAVGALAKAVYEKMFLWMVVRINQQLDTKQPRQYFIGVLDI
AGFEIFDFNSFEQLCINFTNEKLQQFFNHHMFVLEQEEYKKEGIEWTFIDFGMDLAACIELIEKPMGIFSILEEECMFPKATDTSFKNKLYDQ
HLGKSSNFQKPKPAKGKAEAHFSLVHYAGTVDYNITGWLEKNKDPLNETVIGLYQKSSVKTLALLFATYGGADAEAGGGGKKGGKKKGSSFQT
VSALFRENLNKLMTNLRSTHPHFVRCIIPNETKTPGAMEHELVLHQLRCNGVLEGIRICRKGFPSRVLYADFKQRYKVLNASAIPEGQFIDSK
KASEKLLSSIDVDHTQYKFGHTKVFFKAGLLGLLEEMRDEKLAQLITRTQARSRGFLMRVEYQRMVERRESIFCIQYNVRSFMNVKHWPWMKL
FFKIKPLLKSAESEKEMANMKEEFEKTKEELAKSEAKRKELEEKMVKLVQEKNDLQLQVQAEADSLADAEERCDQLIKTKIQLEAKIKEVTER
AEDEEEINAELTAKKRKLEDECSELKKDMDDLELTLAKVEKEKHATENKVKNLTEEMAALDETIVKLTKEKKALQEAHQQTLDDLQAEEDKVN
TLTKAKTKLEQQVDDLEGSLEQEKKLRMDLERAKRKLEGDLKLAHDSIMDLENDKQQLDEKLKKKDFEISQIQSKIEDEQALGMQLQKKIKEL
QARIEELEEEIEAERTSRAKAEKHRADLSRELEEISERLEEAGGATAAQIDMNKKREAEFQKMRRDLEEATLQHEATAAALRKKHADSTAELG
EQIDNLQRVKQKLEKEKSELKMEIDDLASNMESVSKAKANLEKMCRTLEDQLSEIKTKEEEHQRMINDLNTQRARLQTEAGEYSRQVEEKDAL
ISQLSRGKQAFTQQIEELKRHLEEEIKAKNALAHALQSARHDCDLLREQYEEEQEAKGELQRALSKANSEVAQWRTKYETDAIQRTEELEEAK
KKLAQRLQDAEEHVEAVNAKCASLEKTKQRLQNEVEDLMIDVERANAACAALDKKQKNFDKILAEWKQKYEETQAELEASQKESRSLSTELFK
MKNAYEESLDHLQTLKRENKNLQQEISDLTEQIAEGGKAIHELEKVKKQIEQEKSEIQAALEEAEASLEHEEGKILRLQLELNQVKSEIDRKI
AEKDEEIDQLKRNHLRIVESLQSSLDAEIRSRNEALRLKKKMEGDLNEMEIQLSHANRVAAEAQKNLRNTQAVLKDTQIHLDDALRTQEVLKE
QVAMVERRANLLQAEIEELRAALEQTERSRKVAEQELMDASERVQLLHTQNTSLINTKKKLETDIAQIQSEMEDTIQEARNTEEKAKKAITDA
AMMAEELKKEQDTSAHLERMKKNLDQTVKDLQHRLDEAEQLALKGGKKQIQKLEARVRELEGEVDAEQKRSAEAVKGVRKYERRVKELTYQSE
EDLKNILRLQDLVDKLQMKVKSYKRQAEEAEELSNVNLSKFRKIQHELEEAEERADIAESQVNKLRVKSREFHSKKIEEEE
(SEQ ID NO: 33)
>P13538|HAYSS_CHICK
MASPDAEMAAFGEAAPYLRKSEKERIEAQNKPFDAKSSVFVVHPKESFVKGTIQSKEGGKVTVKTEGGETLTVKEDQVFSMNPPKYDKIEDMA
MMTHLHEPAVLYNLKERYAAWMIYTYSGLFCVTVNPYKWLPVYNPEVVLAYRGKKRQEAPPHIFSISDNAYQFMLTDRENQSILITGESGAGK
TVNTKRVIQYFATIAASGEKKKEEQSGKMQGTLEDQIISANPLLEAFGNAKTVRNDNSSRFGKFIRIHFGATGKLASADIETYLLEKSRVTFQ
LPAERSYHIFYQIMSNKKPELIDMLLITTNPYDYHYVSQGEITVPSIDDQEELMATDSAIDILGFSADEKTAIYKLTGAVMHYGNLKFKQKQR
EEQAEPDGTEVADKAAYLMGLNSAELLKALCYPRVKVGNEFVTKGQTVSQVHNSVGALAKAVYEKMFLWMVIRINQQLDTKQPRQYFIGVLDI
AGFEIFDFNSFEQLCINFTNEKLQQFFNHHMFVLEQEEYKKEGIEWEFIDFGMDLAACIELIEKPMGIFSILEEECMFPKATDTSFKNKLYDQ
HLGKSNNFQKPKPAKGKAEAHFSLVHYAGTVDYNISGWLEKNKDPLNETVIGLYQKSSVKTLALLFATYGGEAEGGGGKKGGKKKGSSFQTVS
ALFRENLNKLMANLRSTHPHFVRCIIPNETKTPGAMEHELVLHQLRCNGVLEGIRICRKGFPSRVLYADFKQRYRVLNASAIPEGQFMDSKKA
SEKLLGSIDVDHTQYRFGHTKVFFKAGLLGLLEEMRDDKLAEIITRTQARCRGFLMRVEYRRMVERRESIFCIQYNVRSFMNVKHWPWMKLFF
KIKPLLKSAESEKEMANMKEEFEKTKEELAKSEAKRKELEEKMVVLLQEKNDLQLQVQAEADSLADAEERCDQLIKTKIQLEAKIKEVTERAE
DEEEINAELTAKKRKLEDECSELKKDIDDLELTLAKVEKEKHATENKVKNLTEEMAVLDETIAKLTKEKKALQEAHQQTLDDLQVEEDKVNTL
TKAKTKLEQQVDDLEGSLEQEKKLRMDLERAKRKLEGDLKLAHDSIMDLENDKQQLDEKLKKKDFEISQIQSKIEDEQALGMQLQKKIKELQA
RIEELEEEIEAERTSRAKAEKHRADLSRELEEISERLEEAGGATAAQIEMNKKREAEFQKMRRDLEEATLQHEATAAALRKKHADSTAELGEQ
IDNLQRVKQKLEKEKSELKMEIDDLASNMESVSKAKANLEKMCRTLEDQLSEIKTKEEQNQRMINDLNTQRARLQTETGEYSRQAEEKDALIS
QLSRGKQGFTQQIEELKRHLEEEIKAKNALAHALQSARHDCELLREQYEEEQEAKGELQRALSKANSEVAQWRTKYETDAIQRTEELEEAKKK
LAQRLQDAEEHVEAVNAKCASLEKTKQRLQNEVEDLMVDVERSNAACAALDKKQKNFDKILAEWKQKYEETQTELEASQKESRSLSTELFKMK
NAYEESLDHLETLKRENKNLQQEIADLTEQIAEGGKAVHELEKVKKHVEQEKSELQASLEEAEASLEHEEGKILRLQLELNQIKSEIDRKIAE
KDEEIDQLKRNHLRIVESMQSTLDAEIRSRNEALRLKKKMEGDLNEMEIQLSHANRMAAEAQKNLRNTQGTLKDTQIHLDDALRTQEDLKEQV
AMVERRANLLQAEVEELRGALEQTERSRKVAEQELLDATERVQLLHTQNTSLINTKKKLETDIVQIQSEMEDTIQEARNAEEKAKKAITDAAM
MAEELKKEQDTSAHLERMKKNMDQTVKDLHVRLDEAEQLALKGGKKQLQKLEARVRELEGEVDSEQKRSAEAVKGVRKYERRVKELTYQCEED
RKNILRLQDLVDKLQMKVKSYKRQAEEAEELSNVNLSKFRKIQHELEEAEERADIAESQVNKLRVKSREIHGKKIEEEE
(SEQ ID NO: 34)
>sp|P16419|MYPC2_CHICK Myosin-binding protein C, fast-type OS = Gallus gallus OX = 9031
GN = MYBPC2 PE = 1 SV = 3
MPEPSKAAPKKEAKKKEEKKEEKKEAPPPQEHKDEAPDDVHPPETPDPEGLFLSKPQNVMVESGRDVTVSARVAGAALPCAPAVKWFKGKWAE
LGDKSARCRLRHSVDDDKVHTFELTITKVAMGDRGDYRCEVTAKEQKDSCSFSIDVEAPRSSEGNVLQAFKRTGEGKDDTAGELDFSGLLKKR
EVQVEEKKKKKDEDDQFPPEIWELLKGVTKKSEYERIAFQYGITDLRGMLKRLKKVHVEPKKSEAFIRKLDPAYQVDKGNKIKLVVELSDPDL
PLKWYKNGQLLKPSTKYVFENVGLKRILTIHKCSLADDAAYECRVNDEKCFTEVEVKEPPVTVVRGLEDQQVVVGDRVVLEAEVSEEGAQVMW
LKDGVDVTRDDAFKYRFKKDGKKHFLIINEAELSDSAHYKIMTNGGESEAELSVEEKQLEVLQDMADLTVKASEQAVFKCEVSDEKVTGRWFR
NGVEVKPSKRIHISHNGRFHKLVIDDVRPEDEGDYTFIPDGYALSLSAKLNFLEIKVEYVPKQEPPKIHLDCSGKAAENTIVVVAGNKVRLDV
PISGEPAPTVTWKRGDQLFTATEGRVHIDSQADLSSFVIESAERSDEGRYCITVTNPVGEDSATLHVRVVDVPDPPQSVRVTSVGEDWAVLSW
EAPPFDGGMPITGYLMERKKKGSMRWMKLNFEVFPDTTYESTKMIEGVFYEMRVFAVNAIGVSQPSLNTQPFMPIAPTSEPTHVVLEDVTDTT
ATIKWRPPERIGAGGVDGYLVEWCREGSNEWVAANTELVERCGLTARGLPTGERLLFRVISVNMAGKSPPATMAQPVTIREIVERPKIRLPRH
LRQTYIRRVGEQVNLVIPFQGKPRPQVTWSREGGALPAEVQTRTSDVDSVFFIRSAARPLSGNYEMRVRIDNMEDCATLRLRVVERPGPPQAV
RVMEVWGSNALLQWEPPKDDGNAEISGYTVQKADTRTMEWFTVLEHSRPTRCTVSELVMGNEYRFRVYSENVCGTSQEPATSHNTARIAKEGL
TLKMVPYKERDLRAAPQFLTPLVDRSVVAGYTVTLNCAVRGHPKPKVTWLKNSVEIGADPKFLSRHGLGVLSLLIRRPGPFDGGTYGCRAVNE
MGEATTECRLDVRVPQ (SEQ ID NO: 35)
>tr|E1BNV1|E1BNV1_BOVIN Myosin binding protein C, fast type OS = Bos taurus OX = 9913
GN = MYBPC2 PE = 4 SV = 2
MPEAKPAAKKAPAGKDAAAKPAPKEATPQEAPAAPPTEAPPEDQSPTAEEPTGVFLKKPDSVSVETGKDTVIVAKLNGKELPAKPAVKWFKGK
WLELGSKSGARFSFKESHDAASNVYTIELHITKVVLGDRGDYRIEVKAKDFCDSCAFNIDVEAPRQDSAGQSLESFKRSGEAKSDTAGELDFS
GLLKKRQVVEEEKKKKKDDDDLGIPPEIWELLKGAKKSEYERIAFQYGITDLRGMLKRLKKAKVEVKKSAAFTKKLDPAYQVDRGNKIKLVVE
ISDPDLPLKWFKNGQEIKPSSKYVFENVGKKRILTINKCTLADDAAYEVVVKDEKCFTELFVKVEPPVLIVTPLEDQQVFVGDRVEMAVEVSE
EGAQVMWLKDGVELTREDSFKARYRLKKDGKRHILIYSEVTMEDKGHYQVMTNGGQCEAELIVEEKQLEVLQDIADLTVKASEQAVFKCEVSD
EKVTGKWYKNGVEVRPSKRITISHTGRFHKLVIDDVRPEDEGDYTFVPDGYALSLSAKLKFLEIKVEYVPKQEPPKIHLDCSGQTSENAIVVV
AGNKLRMDVSITGEPRPVATWMKEDEVFTGTEGRVRIEQRGDISSFVIESAERGDEGRYTIKVTNPVGEDVASILLKVVDVPDPPEAVRVTSV
GEDWAVLVWEPPKYDGGRPVTGYLLERKKKGSQRWMKLNFEVFTETTYESTNMIEGILYEMRVFAAPLIQQLKTLTPQPHAPFSPTSEPQHLT
VEDVTDTTTTLKWRPPDKIGAGGIDGYLIEYCVEGSDEWIPANTEPVERCGFTVKNLPTGAKITFRVVGVNIAGRSQPATLAQPVTIREIVEQ
PKIRLPRHLRQTYVRKVGEHLNLVIPFQVRRAKGGAPIDTSHVHVRTSDFDTVFFVRQAARSDSGEYELTVQIENMKDTATVCIRVVEKAGPP
QNVMVKEVWGTNALVEWQPPKDDGNSEITGYFVQKADKKTMEWFTVYERNRHTSCTVSDLIMGNEYYFRVYSENVCGLSDLPGVSKNTARIVK
TGMTLKLPEYKEHDFRTPPKFLTPLPDRVVVAGYAAALNCAVRGHPKPKVVWMKNKMEIREDPKFLMTNQQGVLTLNIRRPSPFDSGTYSCRA
VNELGEALAECKLEVRAPR (SEQ ID NO: 36)
>sp|Q05623|MYBPH_CHICK Myosin-binding protein H OS = Gallus gallus OX = 9031 GN = MYBPH
PE = 1 SV = 1
MTGKTAPAAAKKAPAAKKAPAPASKKAPEPAPKEKPAPTPKEGHAPTPKEEHAPPPKEEHAPPPKEEHAPAPAAETPPAPEHPPDAEQPAAPA
AEHAPTPTHEAAPAHEEGPPPAAPAEAPAPEPEPEKPKEEPPSVPLSLAVEEVTENSVTLTWKAPEHTGKSSLDGYVVEICKDGSTDWTAVNK
EPFLSTRYKIHDLASGEKVHVRVKAISASGTSDPATLEQPVLIREITDLPRIRLPRQLRQVYVRHVGEAVNLLIPFQGKPQPQVTWTKDNQPL
DTSRVNIRNTDKDTIFFIRTAQRSDSGKYQLSVRINGAEDKAILDIRVIERPGPPQNLKLVDVWGENVALEWSPPADNGNSEIKGYTVQKSDK
KSGKWFTVLERCTRTSCTISDLIIGNTYSFRVFSENACGMSETAAVAAGVAHIKKTVYQPQKIPERDMMEPPKFTQPLTDRATTRGYSTHLFC
SVRGFPQPKIIWMKNKMEIREDPKYIAMIEQGVCSLEIRKPSPFDAGVYTCKAVNPLGEASVDCKLDVKMPK (SEQ ID NO: 37)
>tr|G3X6W9|G3X6W9_BOVIN Myosin binding protein H OS = Bos taurus OX = 9913 GN = MYBPH PE = 4
SV = 1
MTEKATSEAPACGLEETTSESAHVPLTEPSGDTAAPQAPGGEQAPRGQQASDPQESARQPPDPAASAAPAGPAATDPALPREDVPSAPLLLAV
EDVSDSSVTVSWEPPERLGRLGLQGYVLELRREGALDWVPVNARPMMVTQQTLRNLAVGDKFFVRVAAVSSAGAGPPAVLERLIHIQETIEAP
KIRVPRHLRQTYIRQVGESINLQIPFQGNPKPQALWTHNGHALDSQRVSVRTGDQDSILFIRSAQRSDSGCYELTVQLKDLEAKAAINILVIE
KPGPPRSIRLLDVWNCNATLEWTPPQDTGNTELLGYTVQKADKKTGQWFTVLERCHPTSCTVSDLIVGNSYSFRVFSENLCGLSASAAVTKEL
AHIVKTDIVAKPKSFVERDFSEAPSFTQPLADHTSTPGYSTQLSCSVRASPKPKIIWMKNKMDIQGDPKYRALSEQGVCTLEIRKPSPFDSGV
YTCKAINVLGEASVDCRLEVKASATH (SEQ ID NO: 38)
>tr|A6BM71|A6BM71_CHICK Connectin (Fragment) OS = Gallus gallus OX = 9031 GN = TTN PE = 2
SV = 1
MTTKAPTFTQPLQSVVALEGSAATFEAHISGFPVPEVSWYRDGQVLSAATLPGVQISFSDGRAKLVIPSVTEANSGRYTIQATNGSGQATSTA
ELLVTAGTAPPNFSQRLQSMTARQGSQVRLDVRVTGIPTPVVKFYRDGVEIQSSPDFQILQEGDLYSLIIAEAYPEDSGTYSVNATNNVGRAT
STAELLIQGEEEAVPAKKTKTIVSTAQISQTRQARIEKKIETHFDARSLTSVEMVIEGAAAQQLPHKAPPRMPPRPTSKSPTPPVITAKAQMA
RQQSPSPVRQSPSPVRHVRAPTPSPVRSVSPAGRISTSPIRPVKSPSPIRKAQVVTPGAEVLPPWRQEGYSATAEAQMKETRVSTSATEIRTE
ERWEGRYGLQEQVTISGAAAGEVAAGAKEVRKEPEKTPVPTVIIATDKAKEQERISTAREEISARHEQVHVSHEQIEAGKRAEAVATVVAAVD
QARVRSPWETEQVDETYVKKKTLEYGYKEHAVKDHEAQAEHHVATKEVKTVYVPPEKHIPAAEKKEVHVSTEIKRETEAKIEKTIHIEHPRPR
TASPHFTVSKIAVPKPDHTYEVSIAGSAMATLEKELSATSAAQKITKPVKPPQLKPHEVKIKPESAPPQFPFTEAAETYKAHYDVETKKEVDV
SIKGEAVREDHLLLRKESEAKVTETARVPVPAEIPVTPPTLVWGLKNKTVTEGESVTLECHISGHPQPTVTWYREDYKIESSMDFQITFKAGL
ARLVIREAFAEDSGRFTCTATNKAGSVSTSCHLHVKVSEETETRETISEKVVTEEKSYVETKDVVMEDVSAAAEEVSGEPVPPFFIRKPVVHK
LIEGGSIIFECQVGGNPKPHVLWKKGGVPLTTGYRYKVSYKRETGECKLEISMTFADDAGEYTIVIRNKFGEASATVSLLEEADYEAYIKSQQ
EMMYQTQVTAYVQEPKVAEVAPPISYGDFDKEYEKEQALIRKKMAKDTVMVRTFVEDEEFHISSFEERLIKEIELRIIKTTLDELLEEDGEEM
MIDISESEAIGAGFDLRLKNYRTFEGTGVTFHCKTTGYPLPKIAWYKDGKRIRHGERYHMEVLQDGSASLRLPVVLPEDEGIYTVFASNMKGN
AICSAKLYVEPVAPTATPGYMPGPEVMRRYRSISPRSPSRSPARSSPSCSPARRLDETDEGQLERLYKPVFVLKPTSVKCSQGQTARFDLKVV
GRPMPETYWFHNGQQVVNDYTHKIVIKEDGTQSLIIVPAMPEDSGEWAVIAQNRAGKASVSVTLSVEAKEDLVRPRFVERLRNVSVKEGSRLH
MAVKATGNPNPDIVWLKNSDIIVPHKYPRIRIEGTKGAAALNIESTARQDAAWYTATAINKAGRDTTRCKVNVEVEHAEPEPERRLIIPKGTY
KAKEIAAPELEPLHLRYGQEQWEEGDLYDKEKQQKPFFKKKLTSLRLKQFGPAHFECRLTPIGDPTMVVEWLHDGKPLEAANRLRMINEFGYC
SLDYGVAYSRDSGVITCRATNKYGTDHTSATLIVKDEKSLVEESQLPEGRRGMQRIEELERMAHEGALPAVAVDQKEKQKPELVLVPEPARVL
EGETARFRCRVTGYPLPKVNWYLNSQLIRKSKRFRLRYDGIHYLDIVDCKSYDTGEVKVTAENPEGFIEHKVKLEIQQREDFRSVLRRAPEPR
HEPVVTEPGKLLFEVQKIDKPAEATTKEVVKLKRAERITHEKLSEESEELRSKFKRRTEEGYYEAITAVELKSRKKDESYEEMLKKTKEELLH
WTKEIPEEEKKALPPEGKITIPTFKPEKVELSPSMEAPKIFERIQSQTVAQGTDAHFRVRVVGKPDPECQWFRNGVQIERTDRIYWYWPEDNV
CELVIRDVTADDSASIMVKAVNIAGETSSHAFLLVQAKQLISFIQNLQDVVAKERDSMATFECETSEPFIKVKWFKNGIEIHSGEKYRMHSDR
KAHFLSVLAVEMSDADDYSCALVEDESVKTTAKLIVEGAVVEFIKELEDVEVPESFTGELECEVSPEDIEGKWYHGDVELSSNHKYVLASRRG
RRILTIKDVNKDDQGEYSFVVDGKRTHCKLKMKPRPMTILQGLTDQKVCEGDIVQLEVKVSVENVEGVWMKDGHEIQSSDRIHIVLDKQSHML
LIEDATQEDSGTYSFSIPGLELSTTGQVTVYSVEIIVPLKDVHVVEGTKAILECKVSAPDVTSSKWYLNDHQIKPDERVQAVCKGTKQRLVIT
RTHASDEGHYKLMVGKVETSCNVTVEEIEIIRGLHDITCTETQNVSFEVELSHSGIDVIWHFKGQEIKAGPKYKIEARGKIYKLTVVKMMKDD
EGEYVFYAGGKKTSGKLIVAGGAISKPLADLTVAESQRAVFECEVANPESEGQWLKNGKPLPMTDQYRAETDGVKRRLNIPAAKMDDMGEYSY
EIASSKTSAKLHVEAVKIKKTLKNLTVTETQEAVFSVELSHPDVKGALWIKNGVELESNDKYEISVKGTVHTLKIKHCVVTDESVYSFKLGKI
GANARLHVETVKIIKKPKDVTALENAVVSFELSVSHDTVPVRWFHKNVELKQSDKYKMISQRKVHKLMLHNISPADAGEYTAFVGQLECKAKL
FVETIHITKTMKSIEIPETKTASFQCEVSHFNVPSVWLKNGVEIEMSEKFKIVVQGKLHQLNIMNTSSEDSAEYTFVCGNDRVSATLTVKPIL
ITSMLEDINAEEKDTITFEVTVNYEGISYKWLKNGVEIKSTDKCQIRTKKLTHSLSIRNVHFGDAAEYSFVAGKAASSATLYVEARHIEFRKH
IKDIKVVEKKRAIFECEISEPDVQVQWMKDGQELQIGDRMKIQREKYVHRLIIPSTKMSDAGQYTVVAGGNTSSANLIVEGRDVRIRSIRKEI
QVIERQRAEIEFEVNEDDIEPQWYKDGIEINFHYEERYSYVVERRIHRMSIFETTYSDAGEYTFVAGRNRSSVVLYVNAPEPPQIIQELQPTT
VESGKPARFCAIISGKPQPKVSWYKDDQQLSPGFKCKFLHDAQEYTLLLIETFPEDSAVYTCEAKNDYGVATTSASLSVEIPEVVSPELEVPV
YPPAVIVPLRDAVTSEGQSARFQCRVTGTDLKVSWYSKDREIKPSRFFRMTQFEDTYQLEIAEAYPEDEGTYTFVASNSVGQVTSTAILKLEA
PEKIMYEKLEEEIEMEVKVAPILRRRLEPLEVAVNHVAKFTCEVETTPNVKFQWYKAGREIYDGDKYSIRSSNYLSTLEIPRPQVVDCGEYSC
KASNQHGSVSSTAFLTVTEPPRFIKKLDSSRLVKQHDSTRYECKVGGSPEIKVTWYKGETEIHPSEKYSMSFVDSVAVLEMHNLSVEDSGDYS
CEAQNPAGSASTSTSLKVKAPPAFTKKPHPVQTLKGSDVHLECELQGTPPFQISWYKDKREIRSSKKYKVMSENYLASIHILNVDTADVGEYH
CKAVNDVGSDSCIGSVTLRAPPTFVKKLSDVTVVVGETIELQAAVEGAQPISVLWLKDKGEIIRESENLWISYSENVASLKIGNAEPTNAGKY
ICQIKNDAGFQECFAKLTVLEPAVIVEKPGPVKVTAGDSCTLECTVDGTPELTARWFKDGNELSTDHKYKISFFNKVSGLKILNAGLEDSGEY
TFEVKNSVGKSSCTASLQVSDRIMPPSFTRKLKETYGQLGSSAVLECKVYGSPPILVSWFHDGQEITSGDKYQATLTDNTCSLKVNGLQESDM
GTYSCTATNVAGSDECSAFLSVREPPSFVKKPEPFNVLSGENITFTSIVKGSPPLEVKWFRGSIELAPGHKCNITLQDSVAELELFDVQPLQS
GDYTCQVSNEAGKISCTTHLFVKEPAKFVMKVNDLSVEKGKNLILECTYTGTPPISVTWKKNGVILKHSEKCSITTTETSAILEIPNSKLEDQ
GQYSCHIENDSGQDNCHGAITILEPPYFVTPLEPVQVTVGDSASLQCQVAGTPEMIVSWYKGDTKLRGTATVKMHFKNQVATLVFSQVDSDDS
GEYICKVENTVGEATSSSLLTVQERKLPPSFTRKLRDVHETVGLPVTFDCGIAGSEPIEVSWFKDNVRVKEDYNVHTSFIDNVAILQILKTDK
SLMGQYTCTASNAIGTASSSGKLVLTEGKTPPFFDTPITPVDGIIGESADFECHISGTQPIRVTWAKDNQEIRTGGNYQISYVENTAHLTILR
VDRGDSGKYTCYASNEVGKDSCTAQLNVKERKTPPTFTRKLSEAVEETEGNELKLEGRVAGSQPLTVSWYKNNQEVHSSPHCEISFKNNTLLL
HIKSVGQSDAGLYTCKVSNEAGSVLCTSSVVIREPKKPPVFDQPLQPAATEEGDTLQLSCHVRGSEPIRIQWLKAGREIRASERCSFSFANGV
ALLELAAVTKSDSGEYVCKASNVAGTDTCRSKVTVKEKAALVSAAKKADIEGKLYFVSEPQSIKVMEKTVATFIAKVGGDPIPNVKWMKGKWR
QLNQGGRIIIQQRGDEAKLEIKDTTKTDSGLYKCVAFNQHGEIERSVNLQVEERKQEVVEEDVRGKLKRIPTKKKEDEEQTIDILELLKNVDP
KEYEKYARMYGITDFRGLLQAFELLKQTREEESHRLEIELTEKAQKEDQEFEELVAFIQQRLTQTEPVTLIRDIENQTVLTDEDAIFECEIKI
NYPEIKLSWYKGTQKLDSSDKYKIKIEGDRHILKIKNCQLEDQGNYRIVCGPHIASARLTVIEPAVERHLHDTTFKEGNTCTLSCQFSIPNAK
SQWYRNGRPIKIGGRYSTQVSDKVHKLIIKDVRTEDQGQYTCKLDNLETTADLTIEAEPIQFTKSIQNIVVSEHQSATFECEVSFDDAVVTWY
KGPTELTESPKYSFRSEGRCHYMTIHNVTAEDEGVYSVIARLEPRGEARSTAELYLVTKEIKLELKPPDVPDAKVAVPPQKPAEAAPIPILLP
LIPTPEEKKPAEKKVPVKKVSKKVVKKGPKEIPPPEVPEILPEKPKEVKITSMARREEIHEEKMEIYEKPKKVYEEWEEDYGEDHDYYFKEEG
YDEGEEEWEETYDKREVAYEEEQIIHEEVVEVPKKPVPERKPPAITAEKKEKKEVTVHKVPDVPKKIPEEKVPITVPKKPEPTPAKEPEVHKI
IEEKIKVSEPKKPEVPPAKVPEVPKKVVKEEVSVEVPKKPEPPPAKVPEVPKKVVPEEKVHVEVPKKAEPPPPKVLRKKPEEEEPKPEKEPKP
EVKPVPTPVEKIKKPEVPEVPKKKTEIPVIKKEEKHVPEPPKEPKPAAISVPGPEPKPAVALKSPKPAAEPAPAITTAPVTTPVVGKKAEAKP
TKEETPKGISPVKAKKTPSPADAERRKLRPGSGGEKPPEEPPFTYQLKAVPLKFVKEMKDIVLKEAESVGSSAIFEVLISPSTAITSWMKDGS
NIRESPKHKFIADGKDRKLHIIDVQLSDAGEYTCVLRLGNKEKTSTAKLIVEELPVRFVKTLEEEVTVVKGQPLYLTCELNKERSVVWRRDGK
IIKDKPGKFALGIIGLSHSLTITDSDDSDAGTYTVTVEDSELSCSSCVKVVEVIRDWLVKPIRDQHVKPKGTATFTCDIVKDTPNIKWFKGDE
EIPAEPTDKTEILKEGNKIFLKIKNAGPADIGEYSVEVEGRRYPAKLTLGEREVELLKPLEDVTVYEKETANFDTEISEEDIPGEWKLKGEIL
RPSPTCEIKAEGGKRFLTLHKVKLEQAGEVLYQALNAVTTAILTVKEIELDFAVPLKDVTVPEKRQARFECVLTREANVIWSKGTDILKIGEK
FDIIADGKKHILVINDSQFDDEGEYTAEVEGKKSTARLFVEGVRLKFITPLQDQTVKEGETAYFQFELSHEGMLVKWYKNDKRLHTSRTVFIT
SEGKVHKLEMREVTLDDISEIKAVVKDMNTQANLKVLEADPYFTVKLQDYSALEKDDITLQCELSKDVPVKWYKDGEELVASSRISIKTDGLR
RILTIKKATEGDKGVYECSCGTDKTNCNIGVEPRLIKVERPLYGVEVFVGETARFEIEISEPDVHPIWKLKGETLTPSPECEIIEDGKKHILI
LHQGRLDMTGEVSFQAANAKSAANLKVKELPLIFITPLSDVKVFEKDEAKFECEVSREPKTFRWLKGTQEITPDERFEIISDGTKHALIIKSV
AFDDEAKYMFEAEDKRTSAKLIIEGIRLKFITPLKDVTKKERETAVFTVELSHENIPVVWFKNDQRLHTSKVVSMTDDGKFHTLTIKDLTIDD
TSQIRVEAMGKSSEAKLTVLEGDPYFTGKLQDYTAVEKDEVILQCEISKADAPVKWMKDGKPITPSKNVVIKADGKKRILILKKALKKDIGQY
TCDCGTDQTSANLNIEDRDIEIIRPLYSVEVIETETARFDIEISEEGVHGNWKLKGEPLTESPDCEIKEEGKKHFLTLYNVRLDQAGGVDFQA
ANAKSGAHLRVKPRVIGLLRPLKDVTVTAGESATFDCELSYEGIPVEWYLQGKKLEPSDKVVTRAEGRAHTLILRDVKLTDAGEVSLTAKDFR
TQANLFVKEPPVEFTKPLEDQTVEEEATAILECEVSRENAKVKWFKNGEEIHKTKKYDIISEGRVRKLIIHGCTLDDAKTYTCDAKDFKTSCF
LNVEPLRVEFLRPLTDLEVKEKRICSVLNVKFLAQGVKVKWFKDGIEIEKAEYDIISKGAERILVISKCLFDDEAEYACEAKTARTSGLLTVI
EEEAVFTKNLHDLEVNENETVRLICEISKPNAEVTWFKGDEEVPDGGRFEYISDGRKRILVIRNAHPEDAGKYTCKLPSSSTTGKLTVHELAA
EFLTRPQNLEVLEGDKAEFACSVSKEAITVQWLWGDTVLEPGDKYDIISDGKKRTLVVKDSVVGDAGKYTVMVGEAKATARLTVIEKTQDYNS
LKDQEVNEGQEIIFNCEVNKEGAKEKWYKNGEAIFDSAKYIIVQKDLVYTLRIRDTQLKDQATYSISLSNHRGEHAESSAALTVLEEGLRIVE
PLEDIETMEKKTVTFWCKVNRLNATLKWTKNGEEITFNKRILYKIDKYKHSLIIKDCGFKDEGEYTVTAGQDKSVAELLITEAPADFIEHLQD
QTVTEFDDAVFTCQLSKEKASVKWYRNGREIKEGKKYQFEKDGNLHRLIIKDCRLDDECEYSCGVDDRKSRARLFVEEIPVEIIRPPQDVYEA
PGADVIFMAELNKDGVEVKWLRNNMIIIQGDKHQMMSEGKVHRLQVCEIKPRDQGEYRFIAKDKEARAKLELAAAPRIKTGDQNLVVDVGNPL
TMTVPYDAYPRAEAEWLKGEESLPTTTVDTTTDCTTFKIYEAKKSDKGRYKVVLRNKHAQAEAFINVEVIDVPGPVRNLEVTEIYDGEVGLAW
QEPESDGGSKIIGYVVERRDIKRKTWIVVTDHAENCEYTVTGLQKGGVEYLFRVSARNRVGTGEPVETERPVEAKSKFEVPGPPQNVEVTDVN
RFGRTLTWEAPEYDGGSPITGYVIELRNRASIKWEPTMTTGADELSAVLTDVVENEEYFFRVRAQNMVGVGKPSHPTRAVKITDPIERPSGNI
NLDHSDQTKTSVQLTWEPPLEDGGSPILGYIIERKEEGTDKWIRCNPKLVPACAFKVTGLKAGSSYYYRVSAENAAGVSDPAEAIGPLTADDP
FVDLQWPLSAFKDGLEVIVPEPIKIRVPITGYPIPTATWSFGDQVLEEGGRVTMKTTSTFAELVITPSERPDKGIYTLTLENPVSSVSGEIDV
NVLARPSAPKELKVVDVSRSTVQLSWEPPEDDGGSPVIDYIIEKREVSRKTWIKVMDHVIDQEFSVPDLIQGKEYLFRVCACNKCGPGEPAYI
DEPINMSAPATVPDPPENVKWRNPTSKGIFLTWEPPKYDGGARIKGYLVEKCQRGTDKWEICGEPVIETKMEVTKLKEGEWYAYRVKALNRIG
ASKPSKPTDDIQAIDAKEAPEIFLDVKLLAGLTVKAGTKIELPAKITGKPEPQITWTKAEKLLRPDDRITIETTPNHSTVTITDSKRSDSGTY
IIEAVNSSGRATAVVEVNVLDKPGPPAAFDVSEITNESCLLTWNPPRDDGGSKITNYVLEKRATDSEIWHKLSSTI (SEQ ID NO: 39)
>A6BLM7|A6BLM7_CHICK Titin isoform Ch12 (Fragment)
EGEEEWEETYDKREVAYEEEQIIHEEVVEVPKKPVPERKPPAITAEKKEKKEVTVHKVVKKPVDEKVEITTQRVAEEKLKQAEVTKKIPSAKP
TPMIIEEKVMKKEAHKEVEEEEEREVISEELETHHVEVPDVPKKIPEEKVPITVPKKPEPTPAKEPEVHKIIEEKIKVSEPKKPEVPPAKVPE
VPKKVVKEEVSVEVPKKPEPPPAKVPEVPKKVVPEEKVHVEVPKKAEPPPPKVLRKKPEEEEPKPEKEPKPEVKPVPTPVEKIKKPEVPEVPK
KKTEIPVIKKEEKHVPEPPKEPKPAAISVPGPEPKPAVALKSPKPAAEPAPAITTAPVTTPVVGKKAEAKPTKEETPKGISPVKAKKTPSPAD
AERRKLRPGSGGEKPPEEPPFTYQLKAVPLKFVKEMKDIVLKEAESVGSSAIFEVLISPSTAITSWMKDGSNIRESPKHKFIADGKDRKLHII
DVQLSDAGEYTCVLRLGNKEKTSTAKLIVEELPVREVKTLEEEVTVVKGQPLYLTCELNKERSVVWRRDGKIIK (SEQ ID NO: 40)
>A6BLM8|A6BLM8_CHICK Titin isoform b11 (Fragment)
SDKYKIKIEGDRHILKIKNCQLEDQGNYRIVCGPHIASARLTVIAEPIQFTKSIQNIVVSEHQSATFECEVSFDDAVVTWYKGPTELTESPKY
SFRSEGRCHYMTIHNVTAEDEGVYSVIARLEPRGEARSTAELYLVTKEIKLELKPPDVPDAKVAVPPQKPAEAAPIPILLPLIPTPEEKKPAE
KKVPVKKVSKKVVKKGPKEIPPPEVPEILPEKPKEVKITSMARREEIHEEKMEIYEKPKKVYEEWEEDYGEDHDYYFKEEGYDEGEEEWEETY
DKREVAYEEEQIIHEEVVEVPKKPVPERKPPAITAEKKEKKEVTVHKVPDVPKKIPEEKVPITVPKKPEPTPAKEPEVHKIIEEKIKVSEPKK
PEVPPAKVPEVPKKVVKEEVSVEVPKKPEPPPAKVPEVPKKVVPEEKVHVEVPKKAEPPPPKVLRKKPEEEEPKPEKEPKPEVKPVPTPVEKI
KKPEVPEVPKKKTEIPVIKKEEKHVPEPPKEPKPAAISVPGPEPKPAVALKSPKPAAEPAPAITTAPVTTPVVGKKAEAKPTKEETPKGISPV
KAKKTPSPADAERRKLRPGSGGEKPPEEPPFTYQLKAVPLKFVKEMKDIVLKEAESVGSSAIFEVLISPSTAITSWMKDGSNIRESPKHKFIA
DGKDRKLHIIDVQLSDAGEYTCVLRLGNKEKTSTAKLIVEELPVRFVKTLEEEVTVVKGQPLYLTCELNKERSVVWRRDGKIIKDKPGKFALG
IIGLSHSLTITDSDDSDAGTYTVTVEDSELSCSSCVKVVEVIRDWLVKPIRDQHVKPKGTATFTCDIVKDTPNIKWFKGDEEIPAEPTDKTEI
LKEGNKIFLKIKNAGPADIGEYSVEVEGRRYPAKLTLGEREVELLKPLEDVTVYEKETANFDTEISEEDIPGEWKLKGEILRPSPTCEIKAEG
GKRFLTLHKVKLEQAGEVLYQALNAVTTAILTVKEIELDFAVPLKDVTVPEKRQARFEC (SEQ ID NO: 41)
>P79757|P79757_CHICK Connectin/titin (Fragment)
KSRLRRRREREITEITSEEEEEIEMVQHVHREFSPPSRLLRRRRSLSPTYIELMRPVSELIRPRSRPPEESERRSPTPERTRPRSPSPVSTER
SLSRFERMARFDIFSRYESMKSALKTQKTMERKYEVLTQQPFTLDHAPRITLRMRSHRVPCGHNTRFILNVQSKPTADVKWYHNGIELQESSK
IHFSNTSGVLTLEILDCHIDDSGTYRAVCTNYKGECSDYATLDVTGGDYTTYSSQRRDEEVPRSILPDLTRTEAYAVSSFKKATAAEASSSVR
EVKSEVSATRESLLSYEHHASSEEKITASEEKSLEERTVHKAFKSTLPATILTKPRSITVSEGETARFSCDVDGEPAPTITWVRAGQPIVSSR
RFQITRTQYKSTFEISLVQIADEGSYTVVVENSEGRQEAHFTLTVQRKRIPEKAITSPPRIKSPEPRVKSPEPVKSPKRVKSPEPISTPSKAK
SPPGDKTAPVEKVQLPTASPPKIKEQLKAETLGDKVKLSCAVESSVLSIREVAWYKDGKKLKEDHHFKFHYAADGTYELKIHNLTESDKGEYT
CEIMGEGGISKTNFQFTGQVFKNIHSQVQSVSETPKSVEKGDKVLAVSTQKKSSAATEEKAAIEEVIKKSIVTEDVKQLQAEIRASSTQMTVS
EGQKVTLKANIPGASEVKWVLNGMELRNSDDYRYGISGSNHTLTIKKASNKDEGILTCEGKTDEGTIKCQYVLTFSKEPSNEPAFITQPKSQN
VNEGQDVLFTCEVSGDPSPEVEWLRNNQPIAVSSHMRATRSKNTYSLEIRNAAVSDTGKYTVKAKNYHGQCSATASLTVFPLIEEPPKEVVLK
TSGDASMHESFSSQSFQMAASKQEASFSSFSSSSMTETKFASMSAKSMSSMKESFVEMSSSSIMGKSSMAQLESSTSKMLKSGVRGVPPKIEA
LPSDISIDEGKVLTLSCAFSGEPAPEITWYCRGRKITSQDQQGRFHIETSEDLTTLIIMDVQKNDGGIYTLNLGNEFGTDSATVNINIRS
(SEQ ID NO: 42)
>BAA11908.1 connectin/titin, partial [Gallus gallus]
MTTKAPTFTQPLQSVVALEGSAATFEAHISGFPVPEVSWYRDGQVLSAATLPGVQISFSDGRAKLVIPSVTEANSGRYTIQATNGSGQATSTA
ELLVTAGTAPPNFSQRLQSMTARQGSQVRLDVRVTGIPTPVVKFYRDGVEIQSSPDFQILQEGDLYSLIIAEAYPEDSGTYSVNATNNVGRAT
STAELLIQGEEEAVPAKKTKTIVSTAQISQTRQARIEKKIETHFDARSLTSVEMVIEGAAAQQLPHKAPPRMPPRPTSKSPTPPVITAKAQMA
RQQSPSPVRQSPSPVRHVRAPTPSPVRSVSPAGRISTSPIRPVKSPSPIRKAQVVTPGAEVLPPWRQEGYSATAEAQMKETRVSTSATEIRTE
ERWEGRYGLQEQVTISGAAAGEVAAGAKEVRKEPEKTPVPTVIIATDKAKEQERISTAREEISARHEQVHVSHEQIEAGKRAEAVATVVAAVD
QARVRSPWETEQVDETYVKKKTLEYGYKEHAVKDHEAQAEHHVATKEVKTVYVPPEKHIPAAEKKEVHVSTEIKRETEAKIEKTIHIEHPRPR
TASPHFTVSKIAVPKPDHTYEVSIAGSAMATLEKELSATSAAQKITKPVKPPQLKPHEVKIKPESAPPQFPFTEAAETYKAHYDVETKKEVDV
SIKGEAVREDHLLLRKESEAKVTETARVPVPAEIPVTPPTLVWGLKNKTVTEGESVTLECHISGHPQPTVTWYREDYKIESSMDFQITFKAGL
ARLVIREAFAEDSGRFTCTATNKAGSVSTSCHLHVKVSEETETRETISEKVVTEEKSYVETKDVVMEDVSAAAEEVSGEPVPPFFIRKPVVHK
LIEGGSIIFECQVGGNPKPHVLWKKGGVPLTTGYRYKVSYKRETGECKLEISMTFADDAGEYTIVIRNKFGEASATVSLLEEADYEAYIKSQQ
EMMYQTQVTAYVQEPKVAEVAPPISYGDFDKEYEKEQALIRKKMAKDTVMVRTFVEDEEFHISSFEERLIKEIELRIIKTTLDELLEEDGEEM
MIDISESEAIGAGFDLRLKNYRTFEGTGVTFHCKTTGYPLPKIAWYKDGKRIRHGERYHMEVLQDGSASLRLPVVLPEDEGIYTVFASNMKGN
AICSAKLYVEPVAPTATPGYMPGPEVMRRYRSISPRSPSRSPARSSPSCSPARRLDETDEGQLERLYKPVFVLKPTSVKCSQGQTARFDLKVV
GRPMPETYWFHNGQQVVNDYTHKIVIKEDGTQSLIIVPAMPEDSGEWAVIAQNRAGKASVSVTLSVEAKEDLVRPRFVERLRNVSVKEGSRLH
MAVKATGNPNPDIVWLKNSDIIVPHKYPRIRIEGTKGAAALNIESTARQDAAWYTATAINKAGRDTTRCKVNVEVEHAEPEPERRLIIPKGTY
KAKEIAAPELEPLHLRYGQEQWEEGDLYDKEKQQKPFEKKKLTSLRLKQFGPAHFECRLTPIGDPTMVVEWLHDGKPLEAANRLRMINEFGYC
SLDYGVAYSRDSGVITCRATNKYGTDHTSATLIVKDEKSLVEESQLPEGRRGMQRIEELERMAHEGALPAVAVDQKEKQKPELVLVPEPARVL
EGETARFRCRVTGYPLPKVNWYLNSQLIRKSKRFRLRYDGIHYLDIVDCKSYDTGEVKVTAENPEGFIEHKVKLEIQQREDFRSVLRRAPEPR
HEPVVTEPGKLLFEVQKIDKPAEATTKEVVKLKRAERITHEKLSEESEELRSKFKRRTEEGYYEAITAVELKSRKKDESYEEMLKKTKEELLH
WTKEIPEEEKKALPPEGKITIPTFKPEKVELSPSMEAPKIFERIQSQTVAQGTDAHFRVRVVGKPDPECQWFRNGVQIERTDRIYWYWPEDNV
CELVIRDVTADDSASIMVKAVNIAGETSSHAFLLVQAKQLISFIQNLQDVVAKERDSMATFECETSEPFIKVKWFKNGIEIHSGEKYRMHSDR
KAHFLSVLAVEMSDADDYSCALVEDESVKTTAKLIVEGAVVEFIKELEDVEVPESFTGELECEVSPEDIEGKWYHGDVELSSNHKYVLASRRG
RRILTIKDVNKDDQGEYSFVVDGKRTHCKLKMKPRPMTILQGLTDQKVCEGDIVQLEVKVSVENVEGVWMKDGHEIQSSDRIHIVLDKQSHML
LIEDATQEDSGTYSFSIPGLELSTTGQVTVYSVEIIVPLKDVHVVEGTKAILECKVSAPDVTSSKWYLNDHQIKPDERVQAVCKGTKQRLVIT
RTHASDEGHYKLMVGKVETSCNVTVEEIEIIRGLHDITCTETQNVSFEVELSHSGIDVIWHFKGQEIKAGPKYKIEARGKIYKLTVVKMMKDD
EGEYVFYAGGKKTSGKLIVAGGAISKPLADLTVAESQRAVFECEVANPESEGQWLKNGKPLPMTDQYRAETDGVKRRLNIPAAKMDDMGEYSY
EIASSKTSAKLHVEAVKIKKTLKNLTVTETQEAVFSVELSHPDVKGALWIKNGVELESNDKYEISVKGTVHTLKIKHCVVTDESVYSFKLGKI
GANARLHVETVKIIKKPKDVTALENAVVSFELSVSHDTVPVRWFHKNVELKQSDKYKMISQRKVHKLMLHNISPADAGEYTAFVGQLECKAKL
FVETIHITKTMKSIEIPETKTASFQCEVSHFNVPSVWLKNGVEIEMSEKFKIVVQGKLHQLNIMNTSSEDSAEYTFVCGNDRVSATLTVKPIL
ITSMLEDINAEEKDTITFEVTVNYEGISYKWLKNGVEIKSTDKCQIRTKKLTHSLSIRNVHFGDAAEYSFVAGKAASSATLYVEARHIEFRKH
IKDIKVVEKKRAIFECEISEPDVQVQWMKDGQELQIGDRMKIQREKYVHRLIIPSTKMSDAGQYTVVAGGNTSSANLIVEGRDVRIRSIRKEI
QVIERQRAEIEFEVNEDDIEPQWYKDGIEINFHYEERYSYVVERRIHRMSIFETTYSDAGEYTFVAGRNRSSVVLYVNAPEPPQIIQELQPTT
VESGKPARFCAIISGKPQPKVSWYKDDQQLSPGFKCKFLHDAQEYTLLLIETFPEDSAVYTCEAKNDYGVATTSASLSVEIPEVVSPELEVPV
YPPAVIVPLRDAVTSEGQSARFQCRVTGTDLKVSWYSKDREIKPSRFFRMTQFEDTYQLEIAEAYPEDEGTYTEVASNSVGQVTSTAILKLEA
PEKIMYEKLEEEIEMEVKVAPILRRRLEPLEVAVNHVAKFTCEVETTPNVKFQWYKAGREIYDGDKYSIRSSNYLSTLEIPRPQVVDCGEYSC
KASNQHGSVSSTAFLTVTEPPRFIKKLDSSRLVKQHDSTRYECKVGGSPEIKVTWYKGETEIHPSEKYSMSFVDSVAVLEMHNLSVEDSGDYS
CEAQNPAGSASTSTSLKVKAPPAFTKKPHPVQTLKGSDVHLECELQGTPPFQISWYKDKREIRSSKKYKVMSENYLASIHILNVDTADVGEYH
CKAVNDVGSDSCIGSVTLRAPPTFVKKLSDVTVVVGETIELQAAVEGAQPISVLWLKDKGEIIRESENLWISYSENVASLKIGNAEPTNAGKY
ICQIKNDAGFQECFAKLTVLEPAVIVEKPGPVKVTAGDSCTLECTVDGTPELTARWFKDGNELSTDHKYKISFFNKVSGLKILNAGLEDSGEY
TFEVKNSVGKSSCTASLQVSDRIMPPSFTRKLKETYGQLGSSAVLECKVYGSPPILVSWFHDGQEITSGDKYQATLTDNTCSLKVNGLQESDM
GTYSCTATNVAGSDECSAFLSVREPPSFVKKPEPFNVLSGENITFTSIVKGSPPLEVKWFRGSIELAPGHKCNITLQDSVAELELFDVQPLQS
GDYTCQVSNEAGKISCTTHLFVKEPAKFVMKVNDLSVEKGKNLILECTYTGTPPISVTWKKNGVILKHSEKCSITTTETSAILEIPNSKLEDQ
GQYSCHIENDSGQDNCHGAITILEPPYFVTPLEPVQVTVGDSASLQCQVAGTPEMIVSWYKGDTKLRGTATVKMHFKNQVATLVFSQVDSDDS
GEYICKVENTVGEATSSSLLTVQERKLPPSFTRKLRDVHETVGLPVTFDCGIAGSEPIEVSWFKDNVRVKEDYNVHTSFIDNVAILQILKTDK
SLMGQYTCTASNAIGTASSSGKLVLTEGKTPPFFDTPITPVDGIIGESADFECHISGTQPIRVTWAKDNQ (SEQ ID NO: 43)
>tr|Q07784|Q07784_CHICK Titin (Fragment) OS = Gallus gallus OX = 9031 PE = 2 SV = 1
RESDHRAWTPVSYTVTRQNAVVQGLTEGKAYFFRIAAENIIGMGPFTETTKELIIRDPITVPDRPEDLEVKAVTKNSVTLTWNPPKYNGGSDI
TMYVLESRLIGKEKFHRVTKEKMLDRKYTVEGLKEGDTYEYRVSACNIVGQGKPSFCTKPITCKDEIAPPTLDLDFRDKLIVRVGEAFSLTGR
YSGKPTPKITWLRDDIVLKEDDRTKIKTTPTTLCLGILKSVREDSGKYCVTVENSTGSRKGFCQVTVVDRPSPPVGPVIFDEVHKDHMIVSWK
PPLDDGGSEITNYIIEKKDTHRDLWMPVTSATVKTTCKIPKLLEGREYQVRIYAENLYGISDPLISDEMKAKDRFSVPDAPEQPVIKDVTKDS
AVVVWNKPYDGGKPITNYIVEKKETMATRWVRVTKDPIFPSTQFKVPDLLEGCQYEFRVSAENEIGVGNPSPPSKPIFARDPIVKPSPPVNPE
AVDKTKNSVDLTWQPPRHDGNGKIIGYLVEYQKVGDEEWKKANLTPDSCPETKYKVTGLTEGLTYKFRVMAVNAAGESEPAYVPDPVEVKDRL
EPPELILDANMAREQHVRAGDTLRLSAVIKGVPFPKVSWKKEDKEVSPKADIEVTGVGSKLEIRNTVHEDGGIYSLTVENPAGSKTVSVKVLV
LDKPGPPRNLQVSDVRSDSCYLTWKEPEDDGGSVITNYVVERKDVASAQWVSVSSSSKKRSHMAKYLMEGTQYLERVAAENLFGRGPYVETLK
PIKAMDPLHPPGPPKNLHHIDVDKTEVSLVWNRPDRDGGAEITGYLVEYQEDGADEWTKFQTVPMLDCVVTGL (SEQ ID NO: 44)
>Q90720|Q90720_CHICK Titin (Fragment)
VTTKQTVISRTREGIVTSQEQRHISREKVRKEPEKTPVPTVIIVTAKVKEQERISTAREEISARHEQVHVSHEQIRREDVKPSVPKVVITTDK
PKAPVLISQSKEGIATKKEHVSISHEKIKKEAKKTTAVLKIIAPVTVSRTREEITAKPEQMHLAYDQIEAGKRAEAVATVVAAVDQARVRSPW
ETEQVDETYVKKKTLEYGYKEHAVKAHEAQAEHHVATKEVKTVYVPPEKHIPAAEKKEVHVSTEIKRETEAKIEKTNHIEHPRPRTASPHFTV
SKIAVPKPDHTYEVSIAGSAMATLEKELSATSAEQKITKPVKPPQLKPHEVKIKPESAPPPFPFTEAAETYKAHYDVETKKEVDVSIKGGAVR
EDHLLLRKESEAKVTETARVPVPAEIPVTPTHLVWGLKNKTVTEGESVTLECHISGHPQPTVTWYRDDYKIESSMDFQITFKAGLARLVIREA
FAEASGRFTCTATNKAGSVSTSCHLHVKVSEETETRETISEKVVTEEKSYVETQDVVMEDASPPPEEVSGEPVPPFFIRKPVVHTLIVGGSII
FEFHVGGNPKPHVLLKKGGVPLTTGYRYKVSYKRETG (SEQ ID NO: 45)
>tr|F1N757|F1N757_BOVIN Titin OS = Bos taurus OX = 9913 GN = TTN PE = 4 SV = 2
MATQAPTFTQPLQSVVVLEGSTATFEAHISGFPVPEVSWFRDGQVISTSTLPGVQISFSDGRAKLTIPAVTKANSGRYSLRATNGSGQATSTA
ELLVTAETAPPNFTQRLQSMTVRQGSQVRLQVRVTGIPTPVVKFYRDGAEIQSSLDFQISQEGELYSLLIAEAYPEDSGTYSVNATNSVGRAT
STAELLVQGEEVVPAKRTKTIVSTAQISETRQTRIEKKIEAHFDARSIAAVEMVIDGAAGQQLPHKTPPRIPPKPKSRSPTPPSIAAKAQLAR
QQSPSPIRHSPSPVRHVRAPTPSPVRSVSPAGRISTSPIRSVKSPLLVRKAQTPTMPPGPEVPPPWKQEGYVASSEAEMRETTVTSATQIRTE
ERWEGRYGIQEQVTISGAAGAAASTTFAAGAVAAGAAEVKQEADKSAAVATVVAAVDMARVREPVISAVEQTAQRTTTTAVHIQPAHEQIRKE
AEKTAVTKVVVAADKAKEQEVKARTREVITTKQEQVHVTHEQIRKETEKAFVPKVVISAAKAKEKETKITGEITTKQEQKQITQETIIQKAET
AAVSMVVVETAKPTTLETILGAQEEIVTQQDQMHITHEKILKETRKTVVPKVIVATPKVKEQDVVSRTREGITTKREQVQVTHEKMRKEAEKT
ALSTIAVATAKAKEQETILRTREEMATRQEQIQVTHGKVGVGKKAEAVATVVAAVDQARVREPREPRHVEESYAQQTTLEYGYKEHISATKVA
EQPPRPASEPQVVPKAVKPGVIHAPSETHIATTDQMGMHISSQIKKTTDLTSERLVHVDKRPRTASPHFTVSKISVPKTEHGYEASIAGSAIA
TLQKELSATPSAQKVTKSVKAPTVKPAEARVRAEPTPSPQFPFAETPETFKSQAGIEVKKEVGVSITGVAVREERFEALRERETKVTETARVP
APVEIPVTPPTLVSGLKNVTVIEGESVTLECHISGYPSPKVTWYREDYQIESSIDFQITFQSGIARLLIREAFAEDSGRFTCTAVNEAGTVST
SCYLAVQVSEEFEKETTAVAEKITTEEKRFVESRDVVMTDTSITEEHAGPGEPAAPFFITKPVVQKLVEGGSIVFECQVGGNPKPHVYWKKSG
VPLTSGYRYKVSYNKQTGECRLVISMTFADDAGEYTIVIRNKHGETSASASLLEEADYESLMKSQQEMLYQTQVTAFVQEPKVGEIAPGYVYS
EYEKEYEKEQALIRKKMAKDTVMVRTFVEDQEFHISSFEERLIKEIEYRIIKTTLEELLEEDGEEKMAVDISESEAIEAGFDLRVKNYRILEG
MGVTFHCKMSGYPLPKIAWYKDGKRIKHGERYHMDFLQDGRASLRIPVVLPEDEGIYTAFASNMKGNAICSGKLYVEPAAPLSAPTYIPTPEP
VSRIRSISPRSVSRSPIRMSPARMSPARMSPGRRLEETDESQLERLYKPVFVLKPTSFKCVEGQTARFDLKVVGRPMPETFWFHDGQQIVNDY
THKVVVKEDGTQSLLIVPATPSDSGEWTVVAQNRAGKSSISVILTVEAVEHQVKPVFVEKLRNLNIKEGSRLEMKVRATGNPNPDIVWLKNSE
IIVPHKYPKIRIEGTKGEAALKIDSTVSQDSAWYTATAINKAGRDTTRCKVNVEVEFAEPEPERRLIIPRGTYRAKEIAAPELEPLHLRYGQE
QWEEGDLYDKEKQQKPFFKKKLTSLRLKRFGPAHFECRLTPIGDPTMVVEWLHDGKPLEAANRLRMINEFGYCSLDYAVAYSRDSGVITCRAT
NKYGTDHTSATLIVKDEKSLVEESQLPEGRKGLQRIEELERMAHEGALTGVTTDQKEKQKPDIVLFPEPVRVLEGETARFRCRVTGYPQPKVN
WYLNGQLIRKSKRFRVRYDGIHYLDIVDCKSYDTGEVKVTAENPEGVIDHKVKLEIQQREDFRSVLRRAPEPKPEFHVHEPGKLQFEVQKVDR
PVDTTETKEIVRLKRAERITHEKVSEESEELRSKFKRRTEEGYYEAITAVELKSRKKDESYEELLRKTKEELLHWTKELTEEEKKALAEEGKI
TIPTFKPDKIELSPSMEAPKIFERIQSQTVGQGSDAHFRVRVVGKPDPECEWYKNGVKIERSDRIYWYWPEDNVCELVIRDVTAEDSASIMVK
AINIAGETSSHAFLLVQAKQLITFTQELQDVVAKEKDTMATFECETSEPFVKVKWYKDGVEIHTGDKYRMHSDRKVHFLSVLMIDTSDAEDYS
CVLVEDENVKTTAKLIVEGAVVEFVKELQDIEVPESFSGELECIITPENIEGKWYHKGVELKSNGKYTITSRRGRQNLTVKDVTKEDQGEYSF
VVDGKKTTCKLKMKPRPIAILQGLSDQKVCEGDIVQLEVKVSLENVEGVWMKDGEEVQPGDRVHIVIDKQSHMLLIEDMTKEDAGHYSFTIPS
LGLSTHGRVSVYSVDVITPLKDVNVLEGTKAVLECKVSVPDVTSVKWYLNDEQIKPDDRVHAIVKGTKQRLVINRTHASDEGPYKLVVGRVET
SCDLSVEKIKIIRGLRDLTCTETQNVVLEVELSHSGIDVLWNFKDKEIKPSSKYKIEAHGKIYKLTVLNMMKDDEGEYTFYAGENRTSGKLTV
AGGAISKPLTDQTVAESQEAVFECEVANPDSEGEWLKDGKHLPLSKTIRSESDGRKRRLIIAATKLDDIGEYTYKVATSKTSAKLKVEAVKIK
KTLKNLTVTETQDAVFTVELTHPNVKGVQWIRNGVVLESSDKYTVSVKGTVYSLRIKNCAVADESVYGFKLGKLGASARLHVETVKIIKKPKD
VTALENATVSFEVSVSHDTVPVKWFHKNVEIKPSDKHRLVSERKVHKLMLQHISPSDAGEYTAVVGQLECKAKLFVETLHITKTMKNIEVPET
KTASFECEVSHFNVPSMWLKNGVEIEMSEKFKIVVQGKLHQLIIMNTSTEDSAEYTFVCGNDQVSATLKVTPIMITSMLKDINAEEKDTITFE
VTVNYEGISYKWLKNGVEIKSTDRCQMRTKKLTHSLNIRNVHFGDAAEYTFVAGKATSTATLYVEARHIEFRKHIKDIKVLEKKRAMFECEVS
EPDITVQWMKDGQELQLVDRIKIQKEKYVHRLLIPSTRMSDAGKYTVVAGGNMSSANLFVEGRDVRIRSIKREVQVIEKQRAVVEFEVNEDDV
DAHWYKDGIEINFQVQERHQYVVERRIHRMFISETRHSDAGEYTFVAGRNRSSVTLYVNAPEPPQILQELQPITVQSGKPARFCAVISGRPQP
KISWYKEEQLLSTGFKCKFLHDGQEYTLLLIEAFPEDAAVYTCEARNDYGVATTSASLSVEVPEVVSPDQEMPVYPPAIVSPLQDAVTSEGRP
AHFQCRVSGTDLKVSWYSKDKKIKPSRFFKMTQFEDTYQLEVAEAFPEDEGIYTFVASNAVGQVSSTATLRLEAPEAMLHEQIEMEMKEFSIS
LLSGKEERPQTSSWDLQLFDINETLEPLSEPSVYSPKFDSKKEGNAPVFIKEVSNAEISIGDVAKLFVTVTGIPTPQIQWFFNGAMLTPSADY
KFVFDGNDHSLIILFTKLEDEGEYTCIASNEYGQAMCSAYLKINSEAEGHEEPESAEKSLEKLQGPCPPYFLKELKPVHCVQGLPAIFEYVVL
GEPAPTVLWFKENKQLCTNVYYTIIHNPDGSGTFIVNDPQKEDGGLYVCKAENVWGGSTCAAELFVLLEDTDMTDATCKAAPTPEAPEGFPHT
SVKDPAVETFDSEQEVVTFVKDAILKASLIAEEKQQFSYEHVVKTNELSSQVTLKAEQLQSTVILEHDMPTPESTRELLSISGTIHVQPIKEL
PPSLQLQIAQSQDTLPREDTLMCQEPESQVVLSDTEKIFPSFMSIEEISLSTVESLQTLLAEPEESYPQPLIKETPAHSYPTSVAEEVLLSKD
KTVSAVDRGQRETSQKQESQNALFLNQNLAEGHAQSLQGPDVTVSRVSSEHTCTESEILMESVDQLDSAGQDFAARIEEGQSLRFPLACEEKQ
VLLKEEHSDTLALPLNQTTEYKKEPMAVNGVQEVQGSDFLSKESLLPGIPEEQRLNLKTQIRSALQAAVASEQLSLFSEWLRNIEQVEVKAID
FTQEPNCIMCTYLITSVKSLTEEVTVTIKGIDPQMADLKTELKEALCSICEEMNILTAEEPGIEKGATVVLQEDVSFSSSQKLEAITEPEAES
KYLVSKEEISYFKVESQVKAVGTTTASAAVSDEKQDELPKPSEEKEKVSEGGTEEVGTVEIQEAEDEEDRKLGEDGPDVQTPLVDTIAEEGDI
ISLTSCITNAKEVNWYFESKLVPSDEKFKCLQDQNTYTLVIDKVNREEHQGEYTCEALNDNGKATTSAKLTVVKRAAPVIRRRIEPLEVALGH
LAKFTCEIHSAPNVRFQWFKAGREIYESDKCSIRSANYVTTLEILRTQVVDCGEYTCKASNEYGSVSCTATLTVTEAYPPTFFSRPKSVTTFV
GKAAKFLCTVTGTPVIETIWQKDGMALSPSPTCKISDVDNKHILELSNLTVHDKGVYSCKASNKFGADTCQAELDIIDKPHFIKELEPVQSAI
NKKIHLEGQVDEDRKVTITWSKNGQKLPPGKDYKIYFEDKIASLEIPLAKLKDSGTYVCTASNEAGSSSTSATVTIREPPSFVKKVDPSYLML
PGESARLHCRLKGSPVIQVTWFKNNKELTESNTIRMSFVNSEAVLDITDVKVEDSGTYSCEAVNDVGSDSCSAEIVVKEPPSFIKTLEPADIV
RGTNALLQCEIAGTGPFEISWFKDKKQIRSSKKYRLFSQKSTVSLEIFSFNSADVGDYECVVANEVGKCGCVATHLLKVEPPTFVKKVDDFTA
LAGQTVTLQAAVRGSEPISVTWMKGQEIIKEDGKIKMSFANGVAVLIIPDVQISFGDKYTCLAENEAGSQTSVGELIVKEPAKIIERAELIQV
TAGDPATLEYTVAGTPELKPKWYKDGRPLVASKKYRISFKNNVAQLKFYSAELHDSGQYTFEISNEVGSSSCETTFTVLDRDIAPFFTKPLRN
VDSVVSGTCRLDCKIAGSLPMRVSWFKDGKEVTSSDRYRIAFVEGTASLEISRVDMSDAGNFTCRATNSVGSKDCSGALIVQEPPSFVTKPAS
KDILPGSAVFLKSTFQGSTPFTIRWFKGDKELVSGGNCYINKEALESSLELYSVKTTDSGTYTCKVSNVAGAVECSANLFVKEPATFVERLEL
SQLLKKGDTTQLACKVTGTPPIKITWFANDREIKESSKHKMSFVESTAVLRLTDIAVEDSGEYMCEAQNEAGSDHCSSILIVKESPYFTKEFK
PIEVLKEYDVMLLAEVAGTPPFEITWFKDNTTLRSGRKYKTFIQDRLVSLQILKFVAADVGKYQCRVTNEVGSSTCSARVTLREPPTFVKKIE
STSSLRGGTAAFQATLKGSLPITVTWLKDNEEITEDDNIRMTFENNVASLYLSGIEVKHDGKYVCQAKNDAGIQRCFAVLSVKEPATIIEEAV
SIDVTQGDPATLQVKFSGTKEITAKWFKDGQELTLGQKYKISVTDTVSILKIISTEKRDSGEYTFEVQNDVGRSSCKASINVLDLIIPPSFTK
KLKKMDSIKGSSIDLECIVAGSHPISIQWFKDDQEITASEKYKFSFHDNTAFLEISQLEGSDSGTYTCSATNKAGHNQCSGHLTVKEPPYFLE
KPQSQDVNPNTRVQLKALVGGTAPMTIKWFKDNKELHSGAARSVWKDDTSTILELFSAKAADSGTYICQLSNDVGTATTKASLFVKEPPQFIK
KPSPVLVLRNGQSTTFECQITGTPEIRVSWYLDGNEITAVEKHGISFIDGLATFQISGARVENSGTYVCEAQNDAGTASCSIELKVKEPPTFI
RELKPVEVVKDSDVELECEVMGTSPFQVTWLRNNKEIRSSKKYTLTDRVSVFNLNINRCDPSDTGDYQCIVSNEGGSCSCSARVSLKEPPSFI
KKIENITTVLKSSATFQSTVAGSPPISITWLKDDQILDEDDNVHISFVNNVATLQIRSVDNGHSGRYTCQAKNESGVERCYAFLLVQEPAQII
EKAKSVDVTERDPVTLECVVAGTPELKVKWLKDGKQIVPSRYFSMSFENNVASFRIQSVMKQDSGEYTFKVENDFGSSSCDAYLRVLDQNIPP
SFTKKLTKMDKVLGSSIHMECKVSGSLPISAQWFKDGKEISTSAKYRLVCHENTVSLDVNNLELEDTANYTCRVSNVAGDAACSGILTVKEPP
SFLVKPERQQAIPDSTVEFKAVLKGTPPFKIKWFKDDVELASGPKCFIGLEGSTSFLNLYSVDASKTGQYTCQVTNDVGSDSCTTTLLVTEPP
KFVKKLEATKIVKAGDSARLECKITGSPDIRVVWYRNEHELPASDKYRMAFIDSVAVLQMNYLGTEDTGDFICEAQNPAGSTSCSTKVIVKEP
PVFSSFPPVVETLKNAEVSIECELSGTPPFEVVWYKDKRQLRSSKKYKIASKNFHASIHILNVDTLDIGEYHCKAQNEVGSDTCICIVKLKEP
PRFVSKLNSLTVVAGEPAELQASIEGTQPISVQWLKEKEEVVRESENIRITFVENVATLQFSKAEPANAGKYICQIKNDGGMRENMATLSFIS
EPAVIVEKAGSMTVTVGETCTLECKVAGTPELSVEWYKDGKLLTSSQKHKFSFYNKISSLKILSVEKQDAGTYTFQVQNNVGKSSCTAVVDVS
DRMVPPSFTRRLKDTIGVLGTSCILECKVAGSSPISVAWFHGKTKIVSGAKYQTTFSDNVCTLQLNSLDSSDMGSYTCVAANVAGSDECRAVL
AVQEPPSFVKEPEPLEVLPGKNITFTSVIRGTPPFKVGWFRGARELVKGDRCNIYFEDTVAELELFNVDISQSGEYTCVVSNNAGQTSCTTRL
FVKEPAVFVKKLSDHSVEPGKSIILESTYKGTLPISVTWKKDGFNITPSEKCSIVTTEKTCILEILNSTKRDAGRYSCEIENEAGRDVCEALV
STLEPPYFVTELEPLEASVGDSVSLQCQVAGSPEITVSWYKGDTKLRPTPEYRTYFTNNVATLVFNKVNINDSGEYTCKAENSIGTASSKTVF
RIQERQLPPSFARQLKDIEQTVGLPVTLTCRLNGSAPIQVSWYRDGVLLRDDENLQTSFVDNVATLKILQTDLSHSGQYSCSASNPLGTASSS
ARLTAREPKKSPFFDIKPVSIDIIAGESADFECHVTGAQPMRITWSKDNKEIRPGGNYTITCVGNTPHLRILKVGKGDSGQYTCQATNDVGKD
MCSAQLSVKEPPKFVKKLEASKVAKQGESIHLECKISGSPEIKVSWFRNDSELHESWKYNMSFVDSVAVLTINEASAEDSGDYICEAHNGVGD
ASCSTALTIKAPPVFTQKPSPIGALKGSDVVFQCEISGTPPFEVVWVKDRKQVRSSKKFKITSKNFDASLHILNLEAADVGEYYCKATNEVGS
DTCVCTLKFKVEPPRFVKKLSDTSTLVGDAVELRAVVEGFQPISVVWLKDKGDVIRESENTRISFVDNVATLQLGSPEASDSGKYVCQIKNDA
GMRECSAILTVLEPARIIEKPEPMTVTTGNAFALECVVTGTPELSAKWFKDGREIAADSKHHITFVNKVASLKIPCAEMSDKGLYSFEVKNSV
GKSTCTVSVHVSDRIVAPSFIRKLKDINAIVGASVVLECRVSGSAPISVGWFQDGNEIVSGPKCQSSFSENVCTLNLSFLEPSDTGTYTCVAA
NVAGSDECSAVLTIQEPPSFEQTPDSVEVLPGTSLTFTSVIRGTPPFKVKWFKGSRELVSGESCSISLEDFVTELELFEVEPLQSGDYSCLVT
NDAGSASCTAHLFVKEPATFVKRLADFSVETGSPIVLEATFTGTPPISVSWMKNEFALTQSQNCSITMTEKSTILEILDSTIEDYAQYSCLIE
NEAGQDICDAVVSVLEPPYFIEPLEHVEAVIGEPITLQCKVDGTPEIRISWYKEHTKLRSAPAYKMQFKNNVASLVINKVDHSDVGEYTCKAE
NIVGAVASSSVLVIKERKLPPSFARKLKDVQETLGFPVAFECRINGSEPLQVSWYKDGVLLKDDANLQTSFVHNVATLQILQTDQSHVGQYNC
SASNPLGTASSSAKLVLLEHEVPPFFDLKPVSVDLALGESGSFKCHVTGTAPMKITWAKDNREIRPGGNYKMTLVENTATLTVLKIGKGDAGQ
YTCYASNVAGKDSCSAHLGVQASIEPPRFIKKLEPSRIVKQDESTRYECKIGGSPEIKVLWYKGETEIQESSKFRMSFVDSVAVLEMHGLSVE
DSGDYTCEACNAAGSASSTTSLKVKALEPPIFRKKPHPVETLKGADVHLECELQGTPPFQVSWHKDKRELRSGKKYKIMSENFLTSIHILSVD
AADVGEYQCKATNDVGSDTCVGSITLKAPPRFVKKPSDVSTIVGEEVQLQATVEGAEPISVVWFKDKGEIVRESDNIWISYSENTATLQFSRA
ETANAGKYTCQIKNDAGMQECSATVSILEPAAIVEKPESITVTTGDTCTLECSVTGTPELTTKWFKDGKELTSDNKYKISFFNKVSGLKIINV
APSDSGVYSFEVQNPVGKDSCTASVQVSDSDRIVPPSFTRRLKETNGLSGSSVVMECKVYGSPPISVSWFHERNEISSGRKYQTTLTDNTCAL
TVNMLEESDAGNYTCIATNVAGSDECSAPLTVREPPSFVQKPDPMDVLTGTNVTFTSIVKGTPPFSVSWFKGSTELVPGDTCNVSLEDSVAEL
ELFDVDTSQSGEYTCIVTNEAGKVSCTTHLYVKAPARFVKKLNDYSIEKGKPLILEGTYTGTPPISVTWKKNGINVTPSQRCNITTTERSAIL
EIPSSTVEDAGQYNCYIENTSGKDSCSAQILILEPPYFVRQLEPVKVTVGDSASLQCQLGGTPEIAVSWFKGDTKLRPTATYKMHFRNNIATL
VFNQVDSNDSGEYICRAENSVGEVSSSTFLTVQEQKLPPSFSRQLRDVQETVGLPVVFECAVSGSEPISVSWFKDGRPVKDSPNIQASFLDNV
ATLNIFQTDRSFAGQYSCTATNPIGSASSSARLILTEGKNPPFFDIPLAPVDAVVGESADFECHVTGTQPIKVAWAKDNREIRSGGNYQISYL
ENSAHLTILKVDKGDSGQYTCYAVNEVGKDSCTAQLNIKERLIPPSFTKKLSETVEETEGNSFKLEGRVAGSQPISVAWYKNNIEIHPTSNCE
ITFKNNTLLLQIKRAGMDDAGLYTCKVSNDAGSALCTSSIVIKEPKKPPVFDQHLTPVTASEGEFVQLSCHVWGSEPIRIQWLKAGREIKPSD
RCSFSFANGTAVLELKDVTKADAGDYVCKASNVAGSDTSKSKVTIKDKPAAVPAAKKAAVDGKLFFVSEPQSIRVVEKTTATFIAKVGGDPIP
NVKWTKGKWRQLNQGGRILIHQKGDEAKLEIRDTTKTDSGLYRCVAFNKHGEIESNVNLQVDERKKQEKIEGDLRAMLKKTPVLKKGAGEEEE
IDIMELLKNVDPKEYEKYARMYGITDFRGLLQAFELLKQTEGEETHRLEIEEIEKSEKDEKEFEELVSFIQQRLSQTEPVTLIKDIENQTVLK
DNDAVFEIDIKINYPEIKLSWYKGTEKLEPSDKFEISIDGDRHTLRVKNCQLKDQGNYRLVCGPHIASAKLTVIATEPAWERHLQDVTLKEGQ
TCTMTCQFSVPNVRSEWFRNGRILKPQGRYKTEVEHKVHKLTIADVRAEDQGRYTCKHEDLETSAELRIEAEPIQFTKRIQNIVVSEHQSATF
ECEVSFDDAIVTWYKGPTELTESQKYNFRNDGRCHYMTIHNVTPDDEGVYSVIARLEPRGEARSTAELYLTTKEIKLEMKPPDIPDSRVPIPT
MPIRAIPPEEIPPTAVPPIPLLLPLPEEKKPPEKRVEVTKKAVKKDAKKVVAKPKEEAPPPKVIEVPKKPPRPTALIPAEAPEIIDVSSKAEE
VKITTITRKKEVQKEKEAVYERKQAVYEEKKVYIESLEEPYDELEVETYTEPYEEPYYEEPEEDYEETQVEAKREVHEEWEEDFEEGQEYYER
EEGYDEGEEEWEETYQEREVVQVQKEVYEESRERKIPAKVPEKKELPPPKVVKKPVVEKIEKTSRRMEEEKVQVTKVPEVSKKIVPQKPSRTP
VQEEIIEVKVPAVHTKKMVISEEKMFFAAHTEEEEEVSVTVPEVQKKTVTEEKVHVAVSKKIEPPPKVPEPPKKPEEVVPVPVPKKVEPPPAK
VPEVPKKPVPEEKKPVPVPKKEPAAPPKVPEVPKKPVPEEKVPVPIAKKKEAPPAKVPEVQKRVVTEEKITIVTEREESPPPAVPEIPKKKLP
EEKRPVPRKEEEVPPPKVPAVPKKPVPEEKVPVPVPVAKKAPPPRAEVSKKMVMEEKRFAAEEKLSVTVPQRVEVMRHEVSAEKEWRYSEEEE
RVSVSVYREEEREEEEVEVTEYEVMEEPEEYIVEEEEHFISEEVEAEPAEESFQVPEKKIIPKPKIPAKVEEPPPAKVPEAPKKIVPEKKIPA
AVPKKEKVPPTKVPEEPKKPVPEKRAPPKVAKIEEPPPTKVTERHMQITQEEKVHVAVTKKVEPPRPKVPEEPKRAVPEEKFPKLKPRKEEEP
PAKVTELRKRAVKEEKVSIEVAKREPPAAKEVTVTAEKEWAYTKEEEAVSVEREEEYEEYEEYDYKEFEEYEPTEEYDQYEEYEEREFEHYEE
YKEHEEYVTEPEKPVPVKPIQEEPVPTKPKAPPAKVPKKVIPEEKVPVPIPKKLKPPPPKAREEAKKVVEEKIQISVIKREKEQVTEPAAKVP
MKPKRVVTEEKVPVPKKEVAAPVRVPEVPKKEEPEEIAFEEEVVTHEEEYYEEEEEEEEYIHEEEEIITEEEVVPVKVFKVPEVPKKPVPEEK
KPVPVPKKKEAPPAKVPEIPKKPEEKVPVPVPKKEKAPPAKVPEVPKKPVPEEKVPVPEEKVPVPVPKKVEAPPAKVPEVPKKPVPEKKVPVP
APKKVEAPPAKVPEVPKKVLPEEKKPTPIRKKVEPPPPKVPKKREPVPVPIPAALLREEKVVHKEEIVVEEEEVLPEEEEISPEEEVPLEEEE
EEEEVLPEEEEVPPEEEEVPPEEEEVPPEEEEFVPEEEVVPEKEEVLPEIKPKVPVPARVPEVKKKVPEKKVIIPKKEEVPPAKVPEVPKKVE
EKRIIVPEEEEVPPVEVFEEPEEPIPEEEIPEEAPIVEEVEEEAPPRVPEVVKKAVPEAPTPVPKKVEVPPAKVPKKVPEEKPPVPVQKKEAP
PAKVPEVPKKVPEKKVPVPKKEVVPPAKGRAVLEEKVSVAFHKEEVVEERTELEIVEAQEEALEEEFHEVEEYFEEEEFHEVEEFLKVEKYRA
EEEVHRAEEVHRVIEVLEAEEEEAYEKPKAPPKGPEISEKVIPPKKPPTKVVPRKEPPAKVPEVPKKIVVEEKVHVPEEPKVAPAKVPEAPKE
VVPEKKVPAAPPKKPEVPPVTVPEAPKEVVPEKKVPVVPPKKPEVPPAKVPEVPKAAVPEKKVPEAIPPKPESPPPAVPEAPKEVVPEKKVPV
MPPKKPEVPPAKVPEAPKEVVPEKKVPVMPPKKPEVPPAKVPEVPKAAVPEKKVPEAIPPKPESPPPAVYEEPEEIAPEEPPVEVVEEPEPVP
APPPKVTVPPKKPVPEKKPPAVVAKKPEPPPAKVPEVPKEVVPEKKVPPVVPKKPEVPPPKVPEVPKEVVPEKKVAVPKKPEVPPAKVPEVPK
KPVLEEKPAIPIPEKVESPPPEEEEEPVPVVEEEEPVPVVEEEEPVPVVEEVEPEAPPPAVPEEPKKIVPEKKVPVIKKPEPPPPKEPEPEKK
VIEKPKLKPRPPAPPPAPPKEDVKEKIFQLKAVSKKKVPEKPAVPEKVELTPLKVAGGEKKVRKLLPEPKPQPKEEVILKSVLRKRPEEEEPK
VEPKKVEKIKKPAVPEPPPKAVEEVEAPPAVTKKERKIPEPTKVPEIKPPIPLPAPEPKPKPEAEVKIIKPPPVEPPPTPIAAPVTVPVVGKK
AEAKAPKEEAAKPKGPIKGVAKKTPSPIEAERKKLRPGSGGEKPPDEAPFTYQLKAVPLKFVKEIKDIVLTEAESVGSSAIFECLVSPSTAVT
SWMKDGSNIRESPKHRFIADGKDRKLHIIDVQLSDAGEYTCVLRLGNKEKTSTAKLIVEELPVRFVKTLEEEVTVVKGQPLYLSCELNKERDV
VWRKDGKIVVEKPGKIVPGVIGLLRALTINDADDSDAGTYTVTVENANNLECSSCVKVVEVIRDWLVKPIRDQHVKPKGTAVFTCVIAKDTPN
IKWYKGYDEIPWEPTDKTEIIRDGNHIHLKVKNAMPEDIDEYAVEIEGKRYPAKLTLGEREVELLKPIEDVTIYEKESASFDAEISEVDVPGQ
WKLKGELLRPSPTCEIKAEDGKRFLTLHNVKLDQAGEVLYQALNAVTTAILTVKEIELDFAVPLKDVTVPEKRQARFECVLTREANVIWSKGP
DIIKSSDKFDIITDGKKHILVINNSQFDDEGVYTAEVEGKKTSARLFVTGIRLKFISPLEDQTVKEGETATFVCELSHEKMHVVWFKNDAKLH
TSRTVLISSEGKTHKLEMREVTMDDISQIKAQVKDLSSTANLKVIEADPYFTVKLHDKTGVEKDEIVLRCEVSKDVPVKWFKDGEELLPSPKH
SIKADGLRRILKIKKADLKDKGEYVCDCGTDTTKANVTVEARLIKVEKPLYGVEVFVGETARFEIELSEPDVHGQWKLKGEPLTASPDCEIIE
DGKKHILVLYNCRLDMTGKVSFQAANAKSAANLKVKELPLIFITPLSDVKVFEKDEAKFECEVSREPKTYRWLKGTQEITGDDRIELIKDGTK
HSLVIKSAAFEDEAKYIFEAEDQHTSGKLIIEGIRLKFLTPLKDVTAKERESAVFTVELSHDNIRVRWFKNDQRLHTSKFVSMDDEGKTHSIT
FRNLSIDDTSQIKVEAMGLSSEAKLTVLEGDPYFTGKLQDYTGVEKEEVILQCEISKADAPVKWFKDGQEIKPSKNAVIKADGKKRMLILKKP
LKSDIGQYTCDCGTDKTSGKLNIEDREIKLVRPLYSVEVMETETARFETEISEDDIHANWKLKGEALLQTPECEIKEEGKTHFLILHNCRLDQ
TGGVDFQAANVKSSAHLRVKPRVIGLLRPLKDITVTAGETATFDCELSYEDIPVEWYLRGKKLEPSDKVVMRSEGRVHTLTLRDVKLEDAGEV
QLVAKDFKTQAKLFVKEPPVEFTKPLEDQTVEEEATAVLECEVSRENAKVKWFKNGTEILKSKKYEIVADGRVRKLIIHGCTPEDIKTYTCDA
KDFKTSCNLNVVPPHVEFLRPLTDLRVKEKEMARFECEISRENAKVHWFKDGAEIKKGKKYDIISKGAVRILVINKCLLDDEAEYSCEVRTAR
TSGMLTVLEEEAVFTKNLANIEVSETDTVKLVCEVSKPGAEVTWYKGDEEIIETGRYEILTDGRKRILIIQNAHLEDAGNYNCRLPSSRTDGK
VKVHELAAEFISKPQNLEILEGEKAEFVCSISKENFEVQWKRDDKTLESGDKYDVIADGKKRVLVVKDATLQDMGTYVVMVGAARAAAHLTVI
EKLRIIVPLKDTRVKEQQEVVFNCEVNTEGAKAKWFRNDEAIFDSSKYIILQKDLVYTLRIRNAQLDDQANYNVSLTNHRGENVKSAANLIVE
EEDLRIIEPLKDIETMEKKSVTFWCKVNRLNVTLKWTKNGEEVAFDNRVLYRIDKYKHSLIIKDCGFPDEGEYVVTAGQDKSVAELLIIEAPT
EFVEHLEDQTVTEFDDAVFSCQLSREKANVKWYRNGREIKEGKKYKFEKDGSIHRLIIKDCRLDDECEYACGVDDRKSRARLFVEEIPVEIIR
PPQDILEAPGADVVFLAELNKDKVEVQWLKNNMIIVQGDKHQMMSEGKIHRLQICDIKPRDQGEYRFIAKDKEARAKLELAAAPKIKTADQDL
VVDVGQPLTMVVPYDAFPKAEAEWFKENEPLSSKTVDTTAEQTSFRILKAKKEDKGRYKVVLQNKHGKAEGFINLKVIDVPGPVRNLEVTETF
DGEVSLAWEEPLTDGGSKIIGYVVERRDIKRKTWVLATDRADSCEFTVTGLQKGGVEYLFRVSARNRVGTGEPVETDSPVEARSKYDVPGPPL
NVTVTDVNRFGVSLTWEPPEYDGGAEITNYVIELRDKTSIRWETAMTVRAEDLSATVTDVVEGQEYSFRVRAQNRIGVGKPSAATPFIKVADP
IERPSPPVNLNASDQTQSSVQLTWEPPLKDGGSPILGYIIERCEEGKDNWIRCNKKLVPELTYKVTGLQKGNKYLYRVSAENEAGVSDPSEIL
GPLTADDADAEPTMDLSAFKDGLEVIVPNPIKILVPSTGYPRPTATWSFGDKVLEAGDRVKMKTLSAYAELVISPSERPDKGIYTLKLENRAK
AISGEIDVNVIARPSAPRELKFGDITKDSVHLTWEPPEDDGGSPLTGYVIEKREVSRKTWTKVIDSVTDLEFTVPDLLQGKEYLFKVCACNKC
GPGEPAYVDEPVNMSAPATVPDPPENVKWRDRTAKSIFLTWDPPKHDGGSRIKGYIVEKCPRGSDRWVACGEPVADTKMEVTGLEEGQWYAYR
VKALNRLGASKPSKPTEEIQAIDTQEAPEIFLDVKLLAGITVKAGTKIELPATVTGKPEPKITWTKADMLLKQDKRITIENVPKKSTVTIMDS
KRSDTGRYIIEAVNVCGRATAVVEVNVLDKPGPPAAFDITDVTNESCLLTWNPPRDDGGSKITNYVVERRATDSDMWHKLSSTVKDTKFKATK
LTPNKEYIFRVAAENMYGVGEPVQATPITAKFQFDPPGPPTRLEPSDITKDAVTLTWCEPDDDGGSPITGYWVERLDPESDKWVRCNKMPIKD
TTYRVKGLTNKKKYRFRVLAENLAGPGKPSKSTEPILIKDAIDPPWPPGKPVVKDIGRTSLMLNWTKPEHDGGAKIDSYVIEMLKTGTEDWVR
VAEGVPTTQHLLPGLMEGQEYSFRVRAVNKAGESEPSEPSDPVLCREKLYPPSPPRWLEVINITKNTADLKWTVPEKDGGSPITNYIVEKRDV
RRKGWQTVDTTVKDTKCTVTPLTEGSLYVFRVAAENAIGQSDYCEVEDSVLAKDTFTTPGPPYALAVVDVTKRHVDLKWEPPKNDGGRPIQRY
VIEKKEKLGTRWVKAGKTSGPDCHFRVTDVIEGTEVQFQVRAENEAGVGHPSEPTEILKIEDPTSPPSPPLDLHVTDAGRKHIAIAWKPPEKN
GGSPIIGYHVEMCPVGTEKWMRVNSRPIKDLKFKVEEGVVPDKEYVLRVRAVNAVGVSEPSEISENVVAKDPDCRPTIDLETHDIVVIEGEKL
SIPVPFRAVPVPTVSWHKDGKEVKASDRLTMKNDHISAHLEVPKSVRADAGIYTVTLENKLGSATASINVKVIGLPGPCRDLKASDVTKSSCK
LTWEPPEYDGGSPILHYVLERREAGRRTYIPVMSGENKLSWTVKDLIPNGEYFFRVKAVNKIGGGEYIELKNPVIAQDPKQPPDPPVDVEVHN
PTAEAMTITWKPPLYDGGSKIMGYIIEKIAKGEERWKRCNEHLVPVLTYTAKGLEEGKEYQFRVRAENAAGISEPSRATPPTKAVDPIDAPKV
IMKTSLEVRRGDEIALDAIISGSPYPTITWLKDESIITPEEIKKRVEPLVRRRRGEVQEEQPFVLPLTQRLSIDNSQKGESQLRVRDSVRPDH
GLFMIKAENDHGIAKAPCTVCVLDIPGPPINFVFEDMRKTSVLCKWEPPLDDGGSEILNYTLEKKDKTKPDSEWMVVTSTLRHCKYSVTKLIE
GKEYLFRVRAENRFGPGPPCVSKPFMAKDPFEPPDAPDKPIVEDVTSNSMLVTWNEPKDNGSPILGYWLEKREVNSTHWSRVNRNLLNSLKTK
VDGLLEGLTYVFRVCAENAAGPGKFSPPSDPKTAQDPISPPGPPVPRVTDTSSTTIELAWEPPAFNGGGEIVGYYVYKQLVGTNEWSRCTEKM
IKPREYTVREIREGADYKLRVTAVNVAGEGPPGETEPVTVAEPQAEPPTVELDVSVKGGIQIMAGKTLRIPAVVTGRPVPTKVWTIEEGELDK
DRVEIENVGTKSELIIKNALRKDHGRYVITATNSCGSKFAAARVEVFDVPGPVLDLKPVVTNRKMCLLNWSDPEDDGGSEITGFIIERKDAKM
HTWRQPIETERSKCDITGLLEGQEYMFRVIAKNKFGCGPPVEIGPILAVDPLGPPTSPERLTYTERTKSTITLDWKEPRSNGGCPIQGYIIEK
RRHDKPDFERVNKHLCPTTSFLVEDLDEHQMYEFRVKAVNEIGESEPSLPLNVVIQDDEVPPTIKLRLSVRGDTIKVKAGEPVNIPADVTGLP
MPKIEWSKNETVIEKPTDALKITKEEVSRSEAKTELSIPKATREDKGTYTVTASNRLGSVFRNVHVEVYDRPSPPRNLAVTDIKAESCYLTWD
APLDNGGSEITHYIIDKRDASRKRAEWEEVTNSAVERRYGIWKLIPNGQYEFRVRAVNKYGISDECKSDKVVIQDPYRTPGPPGKPKVLERTK
GSMLVSWTPPLDNGGSPITGYWLEKREEGGAYWSRVSRAPITKVGLKGVEFNVPRLIEGVKYQFRAMAINAAGVGPPSEPSDPEVAGDPIYPP
GAPSRPEVKDKTKSSITLAWKPPAKDGGSPIKGYIVEMQEEGTTDWKSVNEPDKLLPTCECVVPNLKELKKYRFRVKAVNEAGESEPSDTTGE
IPATDIQEVPEVFIDIGAQDCLICQAGTQIRIPAVIKGRPTPKSSWEFDGKAKKAMKDGVHDIPEDAQLETAENSSVIIIPECKRSHSGKYSI
TAKNKAGQKTANCRVKVMDVPGPPKDLKVSDITRGSCRLSWKMPDDDGGDRIKGYVIEKRTIDGKAWTKVNPNCVSTSFVVPDLIAGQEYFFR
VRAENRFGVGAPAETIQRTTARDPIYPPDPPIKLKIGLVTKNTVHLSWKPPKNDGGSPVTHYIVECLAWDPTGTKKEAWRQCNKRDVEELEFT
VEDLIEGGEYEFRVKAVNAAGVSKPSATVGPVIVKDQTCPPAIELKEFMEVEEGTDVNIVAKIKGVPFPTLTWFKAPPKKPDNKEPIVYDTHV
NKLVVDDTCTLVIPQSRRSDTALYTITAVNNLGTASKEMRLNVLGRPGPPVGPIKFESISADQMTLSWLPPIDDGGSKITNYVIEKREANRKT
WVRVSSEPKECTYTIPKLLEGHEYVFRIMAQNKYGIGEPLDSEPETARNLFSVPGAPDKPTVSSVTRNSMTVNWEEPEYDGGSPVTGYWLEMK
DTTTKRWKRVNRDPIKAMTLGVSYKVTGLIEGSDYQFRVYAINAAGVGPASLPSDPATARDPIAPPGPPFPKVTDWTKSSADLEWSPPLKDGG
SRVTGYIVEYKEEGKEEWEKAKDKEVRGTKLVVTGLKEGAFYKFRVRAVNIAGIGEPGEVTDAIEMKDRLELPDLQLDASVRDRIVVHAGGVI
RIIAYVSGKPPPTVTWNMNERALPQEATIETTAISSSMVIKNCQRSHQGVYSLLAKNAAGERKKTIIVDVLDVPGPVGIPFLAHNLTNDSCKL
TWFSPEDDGGSPITNYVIEKREADHRAWTPVTYTVTRHNATVQGLIQGKAYFFRIAAENSIGMGPFVETTDALVIRDPITVPERPEDLEVKEV
TKESVTLTWNPPKYDGGSDIINYVLESRLIGTEKFHKVTSDNLMSRKYTVKGLKEGDTYEYRVSAVNIVGQGKPSFCTKPITCKDELAPPTLD
LDFRDKLTIRVGEAFALTGRYSGKPKPKVSWFKDEADVLEDDRTHIKTTPTTLALEKLKAKRSDSGKYSVVVENSTGSRKGVCQVNVVDRPGP
PVGPVIFDEVTKDYMVISWKPPLDDGGSEITNYIIEKKEVGKDVWMPVTSASAKTTCKVSKLLEGKDYIFRIHAENLYGISDPLVSDSMKAKD
RFRVPDAPDQPIVTEVTKDSALVSWNPPHDGGKPITNYILEKRETMSKIWARVTKEPIHPYTKFRVPDLLEGCHYEFRVSAENEIGIGDPSPP
SKPVFAKDPIAKPSPPVNPEAIDTTCNSVDLTWQPPRRDGGSKILGYIVEYQKVGDEEWKRANHTPESCPETNYKVTGLRDGQSYKFRVIAVN
AAGESDPAHVPEPVLVKDRLEPPELILDANMAREQHIRVGDTLRLSAIIKGVPFPKVTWKKEDRAAPTKARIDVTPVGSKLEIRNAAHEDGGI
YSLTVENPAGSKTVSVKVLVLDKPGPPRDLEVSEIRKDSCYLTWKEPLDDGGSVITNYVVERKDVASTEWSPLSTTSKKKSHLAKHLNEGNQY
VFRVAAENQYGRGPFVETPKPIKAVDPLHPPGPPKNLHHVDVDKTEVSLVWNKPDRDGGSPITGYLVEYQEEGTPDWIKFKTVTNLACVVTGL
QQGKTYRFRVKAENIVGLGLPDTTIPIECQEKLVPPSVELDVKLIEGLVVKAGTTVRFPAIIRGVPIPTAKWTTDGNEIKTDEHYTVETDNFS
SVLTIKNCLRKDTGEYQITVSNAAGTKTVAVHLTVLDVPGPPTGPINILEVTPEYMTISWLPPKDDGGSPVINYIVEKKDTKKDTWGVVSSGS
SKTKLKVPHLQKGYEYVFRVKAENKIGIGPPLDSVPTVAKHKFSPPSPPGKPVVTDITENAATVAWTLPKSDGGSPITGYYLERREVTGKWVR
VNKTPLVDLKFRVTGLYEGNTYEFRVFAENLAGLSGPSPSSDPIKACRPIKPPGPPINPKLKDKTRESADLVWTKPLSDGGSPILGYVVECQK
AGTTQWDRINKDELIRQCAFRVPGLIEGNEYRFRIKAANIVGEGEPRELAESVIAKDILHPPEVELDVTCRDVITVRVGQTIRILARVKGRPE
PDITWSKEGKALVRDKRVNIIHELPRVELQIKEAVRADHGKYIISAKNSSGHAQGFAIVNVLDRPGPCQNLKVTNVTKENCTISWENPLDNGG
SEITNFIVEYRKPNQKGWSIVASDVTKRLIKANLLANNEYYFRVCAENKVGVGPTIETKTPILAINPIDRPGEPENLHIADKGKTFVYLKWRR
PDYDGGSPNLSYHVERRLKGAADWERVHKGSIKETHYMVDKCVENQIYEFRVQTKNEGGESDWVKTEEVVVKEDLQKPVLDLKLSGVLTVKAG
DTIRLEAGVRGKPFPEVSWTKDKDATDLTRSPRVKIDTSGDSSKFSLTKAKRSDGGKYVVTATNTAGSFVAFATVNVLDKPGPIRNLKITDVC
SDRCSLRWDPPEDDGGCEIQNYILEKCESKRMVWSTFSSTILTPGTTVTRLIEGNEYIFRVRAENKIGTGPPTETKPVIAKTKYDKPGRPDPP
EVTKVSKEEMTVVWAPPEYDGGKSITGYYLEKKEKHSTRWVPVNKSAIPERRLKVQNLLPGHEYQFRVKAENEVGIGEPSLPSRPVVAKDPIE
PPGPPTNLKVVDTTKSSITLGWGKPVYDGGAPIIGYVVEMRPKKADMSPDEGWKRCNAAAQLVRMEFTVTSLDENQEYEFRVCAQNQVGIGRP
AELKDAIKPKEILEPPEIDLDASMRKLVTVRAGCPIRLFAIVRGRPAPKVTWRKVGIDNVVRKGQVDLVDTMAFLVIPNSTRDDSGKYSLTLV
NPAGEKAVFVNVRVLDTPGPVSDLKVSDVTKTSCHISWAPPENDGGSQVTHYIVEKREAERKTWATVTPEVKKTSFHVTNLVPGTEYFFRVTA
VNEYGPGVPTDVPKPVLATDPLSEPDPPRKLEVTEMTKNSAVLAWLPPLRDGGAKIDGYIVSYREEEQPADRWTEYSVVKDLSLVVTGLKEGK
KYKFRVAARNAVGVSLPREAEGVYEAKEQLLPPKILMPEQITIKAGKKLRIEAHVYGKPNPVCKWKKGEDDVVTSSHLAVHKAENSSVLIIKD
VTRKDSGYYSLTAENSSGTDTQKIKVIVMDAPGPPQPPFDISDIDADACSLSWHIPLEDGGSNITNYIVEKCDVSRGDWVTALASVTKTSCRV
GKLIPGQEYIFRVRAENRFGISEPLTSPKMVAKFPFGVPSEPKNARVTKVNKDCIFVAWDRPDSDGGSPITGYLIERKERNSLLWVKANDTPV
RSTEYPCAGLVEGLEYSFRIYALNKAGSSPPSKPTEYVTARTPVDPPGKPEVIDVSKSTVSLVWARPKHDGGSKIIGYFVEACKLPGDQWIRC
NTSPHQIPQEEFTVTGLEENAQYQFRAIAKTAVNISQPSEPSDPVTIMAESVPPRIELSVAMKSLLTVKAGTNVCLDATVFGKPKPTVSWKKD
GTLLKPSEGIKMAMKRNLCTLELFSVTRKDSGDYTITAENPSGSKSATIKLKVLDKPGPPASVKINKMYSDRAMLSWEPPLEDGGSEITNYIV
DKRETSRPNWAQVSATVPITSCSVEKLIEGHEYQFRICAENKYGVGDPILTEPAIAKNPYDPPGRCDPPVISNVTKDHMTVSWKPPADDGGSP
ITGYLVEKRETHAVNWTKVNRKPVIERTIKATGLQEGTEYEFRVIAINKAGPGKPSDASKAVYAQDPLYPPGPPAFPKVYDTTRSSVSLTWGK
PAYDGGSPIIGYLVEVKRADSDNWVRCNLPQKLQKTRFEVTGLMENTEYQFRVYAVNKIGYSDPSDVPDKHCPKDILIPPEGELDADLRKTLI
LRAGVTMRLYVPVKGRPPPKITWSKPNVNLRERVGLDIKSTDFDTFLRCEKVNKYDAGKYILTLENSCGKKEYTIVVKVLDTPGPPVNVTVKE
ISKDSAYITWDPPIIDGGSPIINYVVEKRDAERKSWSTVTTECSKTSFRVSNLEEGKSYFFRVFAENEYGIGDPGETRDAVKASETPGPVVDL
KVTSVTKSSCSIGWKKPRSDGGSRIIGYVVDFLTEENKWQRVMKSLSLQYTTKDLTEGKEYTFRVSAENENGEGTPSEITAVAKDDVVAPDLD
LKDLPDLCYLAKENSNFRLKIPIKGKPVPSVSWKKGEDPLATDTRVSVESSAVNTTLVVYDCRKSDAGKYTITLKNVAGTKEGTLTIKVVGKP
GIPTGPIKFEEVTAEAVTLKWGPPKDDGGSEITNYILEKRDSVNNKWVTCASAVQKTTFRVMRLHEGMEYTFRVSAENKYGVGEGLKSEPIVA
RHPFDVPDAPPPPNIVDVRHDSVSLTWTDPRKTGGSPITGYHIEFKERNSLLWKRANKTPIRMKDFKVTGLTEGLEYEFRVMAINLAGVGKPS
LPSEPVVALDPIDPPGKPEVISVTRNSVTLVWTEPKYDGGHKLTGYIVEKRELPSKSWTKANHVNVPDCAFTVTDLVEGGKYEFRVRAKNTAG
AISAPSESTDTIICKDEYEAPTIVLDPTIKDGLTVKAGDTIILSAISILGKPLPKSSWSKAGKDIRPSDIVQITSTPTSSMIAVKYATRKDAG
EYTITATNPFGTKSEHVKVTVLDVPGPPGPIEISNVSAEKATLTWTPPLEDGGSPIKSYVLEKRETSRLLWTVVAEDIQSCRHVATKLIQGNE
YVFRVSAVNQYGKGEPVQSEPVKMVDRFGPPGPPGKPEVSNVTKNTATVSWKRPVDDGGSEITGYHVERREKKSLRWVRATKTPVSDLRCKVT
GLQEGNTYEFRVSAENKAGIGPPSDASNPVLMKDVAYPPGPPSNARVTDTTKKSASLAWGKPHYDGGLEITGYVVEHQKVGDEGWIKDTTGTA
LRITEFVVPDLETKEKYNFRISAINDAGVGEPAVIPNVEIVEREMAPDFELDAELRRTLVVRAGLSIRIFVPIKGRPAPEVTWTKDNINLKNR
ANIENTESFTLLIIPECNRYDTGKFVMTIENPAGKKSGFVNVRVLDTPGPVLNLRPTDITKESVTLHWDLPLIDGGSRITNYIVEKREATRKS
YSTVTTKCHKCTYKVTGLSEGCEYFFRVMAENEYGIGEPAETTEPVRASEAPSPPDSLNIMDITKSTVSLAWPKPKHDGGSKITGYVIEAQRK
GSDQWTHITTVKGLECVVKNLTEGEEYTFQVMAVNSAGRSAPRESRPVIVKEQTMLPELDLRGIYQKLVIAKAGDNIKVEIPVLGRPKPTVTW
KKGDQILKQTQRVNFENTATSTILNINECVRSDSGPYPLTARNIVGEVGDVITIQVHDIPGPPTGPIKFDEVSSDFVTFSWEPPENDGGVPIS
NYVVEMRQTDSTTWVELATTVIRTTYKATRLTTGVEYQFRVKAQNRYGVGPSITSAPVVANYPFKVPGPPGTPQVAAVTKDSITISWHEPLSD
GGSPILGYHVERKERNGILWQTVSKALVPGNIFKSSGLTDGIAYEFRVIAENMAGKGKPSKPSEPILALDPIDPPGKPVPLNITRHTVTLKWA
KPEYTGGFKITSYIVEKRDLPNGRWLKANFSNILENEFTVSGLTEDAAYEFRVIAKNAAGAISPPSEPSDAITCRDDIEAPRIMVDVKFKDTI
TLKAGEAFKLEADVSGRPPPTMEWTKDGKELENTAKLEIKIADFSTNLVNKDSLRRDGGAYTLTATNPGGFAKHIFHVKVLDRPGPPEGPLAV
SEVTSEKCVLSWLPPLDDGGAKIEYYVVQKRETSRLAWTNVASEVQVTKLKVTKLLKSNEYIFRVMAVNKYGVGEPLDSEPVLAVDPYGPPDP
PKNPEVTSITKDSMVVCWGHPDSDGGSEIINYIVERRDKAGQRWVKCNKKTLTDLRYKVSGLTEGHEYEFRVMAENRAGISAPSATSPFYKAC
DAVFKPGPPGNPRVLDTSRSSISIAWNKPIYDGGSEITGYMVEIALPEEDEWKIVTPPSGLKATSYTITNLTENQEYKIRIYAMNSEGIGEPA
LVPGTPKAEDRMLPPEIELDAELRKVVTIRACCTLRLFVPIKGRPAPEVKWTREHGESLDKASIESTSSYTLLIIGNVNRFDSGKYILTIENS
SGSKSAFVNVRVLDTPGPPQDLKVKEVTKTSVTLTWEPPLIDGGSKINNYIVEKRESTRKAYSTVTTNCHKTSWKVDQLQEGCSYYFRVLAEN
EYGIGLPAETAESVKASERPLPPGKITLVDVTRNSVSLSWEKPEHDGGSRILGYIVEMQSKGSDKWVTCATVKVTEATITGLIQGEEYSFRVS
AQNEKGISDPRQLSVPVIAKDLVIPPAFKLLFTTFTVLAGEDLKVDVPFTGRPTPAVTWHKDDVPLKQTTRVNAESTENNSLLTIKEACREDV
GHYIVKLTNSAGEATETLNVIVLDKPGPPTGPVKMEEVTADSVTFSWGPPKYDGGSSINNYIVEKRDTSTTTWQIVSATVARTTIKACRLKTG
CEYQFRIAAENRYGKSTYLTSEPVVAQYPFKVPGPPGTPFVTLSSKDSMEVHWNEPVSDGGSKVIGYHLERKERNSILWVKLNKTPIPQTKFK
TTGLDEGIEYEFRVSAENIVGIGKPSKVSESYVARDPCDPPGRPEPIIVTRNSVTLQWKKPAYDGGSKITGYIVEKKELPDGRWMKASFTNVI
DTQFEVTGLVEDHRYEFRVIARNAAGVFSEPSESTGAITARDEVEPPQIRMDPKYKDTIVVHAGELFKIDADIHGKPIPTTQWIKGDHELSNT
ARLEIKSTDFATSLSVKDAIRIDSGSYILKAKNVAGEKSVTVNVKVLDRPGPPEGPIVISGVTAEKCTLAWKPPLQDGGSDIINYIVERRETS
RLVWTVVDANVQTLGCKVTKLLEGNEYIFRVMAVNKYGVGEPLESEPVTAKNPFVVPDAPKAPEITAVTKDSMIVVWERPAFDGGSEILGYVL
EKRDKEGIRWTRCHKRLIGELRLRVTGLLENHNYEFRVSAENAAGLSEPSPPSAYQKACDPIYKPGPPNNPRVTDITRSSVFLSWGKPIYDGG
CEIQGYIVEKCDTSVGEWTMCTPPTGINKTNIEVEKLLEKHEYNFRICAVNKAGVGEHADVPGPVIVEEKLEAPDIDLDLELRKILNIRAGGS
LRLFVPIRGRPTPEVKWGKVDGEIRDAAIIDSTSSFTSLVLDNVNRYDSGKYTLTLENSSGTKSAFVTVRVLDTPSPPVNLKVTEITKDSVSI
TWEPPLLDGGSKIKNYIVEKREATRKSYAAVVTNCHKNSWKIDQLQEGCSYYFRVTAENEYGIGLPAHTDDPVKVAEVPQPPGKITVDDVTRN
SVSLSWTKPEHDGGSKIIQYIVEMQAKHSEKWSECARVKSLEAVITNLTQGEEYLFRVVAVNEKGRSDPRSLAVPIVAKDLVIEPDVRPAFNS
YSVQVGQDLKIEVPISGRPKPTITWTKDDLPLKQTTRINVTDSLDLTVLSIKETHKDDGGHYGITVANVVGQKTASIEIITLDKPDPPKGPVK
FDEVSAESITLSWEPPLYTGGCQITNYVVQKRDTTTTVWEVVSATVARTTLKVTKLKTGTEYQFRIFAENRYGQSFALESEPIVAQYPYKEPG
PPGTPFVTAVSKDSMVVQWHEPINNGGSPVIGYHLEKKERNSILWTKVNKTIIHDTQFKAVNLEEGIEYEFRVYAENIVGIGKASKNSECYVA
RDPCDPPGTPEAIIVKRHEITLQWTKPAYDGGSVITGYIVEKRDLPEGRWMKASFTNVIETQFTVSGLTEDQRYEFRVIAKNAAGAVSKPSDS
TGPITARDEVELPRISMDPKFRDTIVVNAGETFRLEADVHGKPLPTIEWLRGDKEIEESARYEIKNTDFKALLIVKDAIRIDGGQYILRASNV
AGSKSFPVNVKVLDRPGPPEGPVQVTGVTAEKCTLTWSPPLQDGGSDISHYVVEKRETSRLAWTVVASEVVTNSLKVTKLLEGNEYIFRIMAV
NKYGAGEPLESAPVLMKNPFVLPGPPKSLEVTNIAKDSMTVCWNRPDSDGGSEIIGYIVEKRDRSGIRWIKCNKRRITDLRLRVTGLTEDHEY
EFRVSAENAAGVGEPSPATLYYKACDPVFKPGPPINAHVVDTTKNSITLAWGKPIYDGGSEILGYVVEICKADEEEWQIVTPQTGLKATRFEI
SKLTEHQEYKVRVCALNKVGLGEATAVPGTVKPEDKLEAPELDLDSELRKGIVVRAGGSVRIHIPFKGRPTPEITWSREEGEFTDKVQIEKAA
NYTQLSIDNCDRNDAGKYVLKLENSSGSKSAFVTVKVLDTPGPPQNLAVKEVRKDSVLLVWDPPLIDGGAKVKNYVIDKRESTRKAYANVSNK
CSKTSLKVENLTEGAIYYFRVMAENEFGIGVPVETVDAVKASEPPSPPGKVTLTDVSQTSASLMWEKPEHDGGSRILGYVVEMQPKGTEKWSV
VAESKVCSAVVTGLSSGQEYHFRVKAYNEKGQSDPRVLGVPVIAKDLTIQPSFKLPFNTYSVQAGEDLKIEIPVIGRPRPEISWVKDGEPLKQ
TTRVNVEKTATSTILHIKESNKDDFGKYTVTATNSAGTATENLSIIILEKPGPPVGPVRFDEVSADFVVISWEPPAYTGGCQISNYIVEKRDT
TTTTWHMVSATVARTTIKITKLKMGSEYQFRIFAENRYGKSAPLDSKPVIVQYPFKEPGPPGTPFVTSVSKDQMLVQWHEPVNDGGSKVIGYH
LEQKEKNSILWVKLNKTPIQDTKFKTTGLDEGLEYEFRVSAENIVGIGKASKVSECFVARDPCDPPGRPEAIVITRNNVTLKWKKPAYDGGSK
ITGYIVEKKDLPDGRWMKASFTNVLDTEFTVSGLVEDQRYEFRVIARNAAGNFSEPSESTGAITARDEIDAPNASLDPKYKDVIVVHAGETFV
LEADIRGKPIPDIVWSKDGRELEETAARMEIKSTIQRTTLVVKDCIRSDGGQYILKLSNVGGTKTIPITVKVLDRPGPPEGPLKVSGVTAEKC
YLAWNPPLQDGGASISHYIIEKRETSRLSWTQVSTEVQALNYKVTKLLPGNEYIFRVMAVNKYGTGDPLESEPVIARNPYKPPGPPSPPEVSA
ITKDSMVVTWARPVDDGGAEIEGYILEKRDKEGVRWTKCNKKTLTDLRFRVTGLTEGHSYEFRVAAENAAGVGEPSEPSVFSRACDALYPPGP
PSNPKVTDTSRSSVSLAWNKPIYDGGAPVKGYVVEVKEATADEWTTCTPPTGLQGKQFTVTELKENTEYNFRICAINSEGVGEPATIPGSVAA
KERQEPPEIELDADLRKVVILRASATLRLFVTIKGRPEPEVKWEKAEGVLTDRAQIEVTSSYTMLVIDNVTRFDSGRYNLTLENNSGSKTAFV
NVRVLDSPSAPVNLTVREVKKDSVILAWEPPLIDGGAKITNYIVEKRETTRKAYATVTNNCTKNSFKIENLQEGCSYYFRVLASNEYGIGLPA
ETTEPVKASEPPLPPGRVTLVDVTRNTATIKWEKPESDGGSKITGYVVEMQTKGSEKWSICTQVKTLEATISGLTAGEEYIFRVAAINEKGKS
DPRQLGVPVIARDIEIKPSVELPFNTFNVKARDQLKIDIPFKGRPQATVSWKKDGQTLKETTRVNVSSSKTVTSLIIKEASREDVGTYELCVS
NSAGSVTVPITVIVLDKPGPPGPIHIDEVSCDNITISWNPPEYDGGCQISNYIVEKRETTSTTWHVVSQAVARTSIKIVRLVTGSEYQFRVCA
ENRFGKSSYSESSAVVAEYPFSPPGPPGTPKVVHATKSTMLVTWQVPVNDGGSRVLGYHLEYKERSSILWSKANKTLIADTQMKVSGLDEGLM
YEYHVYAENIAGIGKCSKSCEPVPARDPCDPPGQPEVTNITRKSVSLKWSKPHYDGGAKITGYIIERRELPDGRWLKCNFTNVPETYFEVTEL
TEDQRYEFRVFARNAADSISEPSESTGPITVKDDVEAPRIMMDVKFRDVIVVKAGEVLKINADVAGRPLPIISWAKDGVEIEERARTEIVSTD
YTTLLTVKDCVRRDSGQYVLTVKNVAGTRSMAVNCKVLDKPGPPAGPLEITGLTAEKCSLSWGPPQEDGGAAIDYYIVEKRETSRLAWTICEG
ELRTTFCKVTKLLKGNEYIFRVTGVNKYGVGEPLESMAVKALDPFTVPSPPTSLEITSVTKEFMTLCWSRPESDGGSEISGYIVERREKNSLR
WVRVNKKPVYDLRVKSTGLREGCEYEYRVYAENAAGLSLPSESSPLIRAEDPVFLPSPPSKPNVMDSGKTNITIGWVKPLFDGGAPITGYTVE
FKKSDETDWQTAIQNLRGTEYTVSGLTTGAEYVFRVRSINKVGASDPSDSSDPQIAKEREEEPVFDLDTEMRKTLIVKAGASFTMTVPFRGRP
VPSVSWSKPDTDLRTRAYIDSTESRTSLTIENANRNDSGKYTLMIQNVLNAASLTLVVKVLDSPGPPANITVHDVTKESAVLSWDVPENDGGA
PVKNYHIEKREASKKAWVSVTNNCNRLSYKITNLQEGAIYYFRVSGENEFGVGVPAETKEGVKITEKPSPPEKLGVTSVSRDSVSLAWLKPEH
DGGSRIVHYVIEALEKGQTTWMRCAVVKSTHHVVSGLRQNSEYFFRVFAENQAGLSDPRELLLPVLIKEQLEPPEIDMKNFPSHTVYVRAGSN
LKVDIPISGKPLPKVTLSRDGVPLKATMRFNTEITAENLTINLKESVAADAGRYEITAANSSGTTKAFINIVVLDRPGPPTGPVVISDITEDS
VTLKWEPPKYDGGSQVTNYIVLKRETSTAVWTEVSATVARTMIKVMKLTTGEEYQFRIKAENRFGISDHIDSACVVVKLPYTTPGPPSTPWVT
NVTRESITVGWHEPVSNGGSPVTGYHLEMKDRNSILWQKANKMVIRTTHFKVTTISAGLIYEFRVYAENAAGIGKPSHPSEPVLAIDACEPPR
NVRITDISKNSVNLSWQQPAFDGGSKITGYMVERRDLPDGRWAKASFTNVTETHFTVSGLTQNAQYEFRVFARNAVGSISNPSEVVGPITCID
SYGGPVIDLPLEYTEVVKYRAGTSVKLRAGISGKPEPTIEWYKDDKELQTNALVCVENTTDLASILIKDATRLNSGTYELKLRNALGSASATI
RLQILDKPGPPGGPIEFKTVTAEKITLLWQPPADDGGAKITHYIVEKRETSRVVWSMVSENLEECIIKTTKIIKGNEYIFRVRAVNKYGIGDA
LESHPVIARNAFVTPGPPSVPEVTKINKNSMTVVWSRPVADGGSDISGYILEKRDKKSLGWFKVLKETIRDTRQKVTGLTEHSDYQYRVCAVN
AAGQGPFSEPSDFYKAADPIDPPGPPAKIRIADSTKSSITLGWSKPVYDGGSAVTGYVVAMRQGEEEEWTVVSTKGEVRTTEYVVSNLSPGVN
YYFQVSAVNCAGQGEPIAMTEPVQAKDILEEPEIDLDVAFRTSIIAKAGEDVHALVPFKGRPPPTVTWRKDEKNLGSDARYSIQNTDSSSILT
IPQVTRHDTGKYILTIENGVGQPKSSTVSVKVLDTPAACQNLQVKHVSQGTVTLFWDPPLIDGGSPIINYIIEKKDATKRTWSSVSHKCSSTS
FKVTDLSEKTPFFFRVFAVNEIGIGEPCETTEPVKAAEVPAPIRDLSVKDSTKTSVTLSWTKPDFDGGSVITDYIVERKGKGEQTWSHAGI5K
TCEIEVGKLKELSELEFRVSARNEKGLSDSVSIGPVTVKELVIPPEVDLSEIPGAQVAVRIGHNVHLELPYKGKPKPSISWLKDGLPLKESEL
VRLGKTENKLTLSIKNAKKENGGKYTIILDNAVCRNTYPITVITLGPPSKPKGPIRFDEIKADSVIMSWDVPDDDGGGEITCYSIEKREASQT
NWKMVCSSVARTTFKVPNLVKDAEYQFRVRAENRYGVSQPLVSNIILAKHQFRIPGPPGKPVTYNVTSDGMSLTWDAPVYDGGSEVTGYHVEK
KERNSILWQRINMSPISGREYRATGLMEGLDYQFRVFAENSAGLSSPSDPSKFTLAVSPVDPPGTPDYIDVTRETITLKWNPPLRDGGSKIVA
YSIEKRQGSDRWTRCNFTDVSECQYTVTGLSPGDRYEFRIIARNAVGTISPPSQSSGVIMTRDENVAPTVEFGPEYFDGITIKSGESLRIKAL
VQGRPVPRVTWFKDGVEIEKKMNMEITDVLGSTSLFVRDATRDHRGVYRVEAKNASGSTKAEITVRVQDTPGKPVGPIRFTNITGEKMTLWWD
APHNDGCAPVSHYLIEKRETSRLAWALIEDNCEALSYTATKLITGNEYQFRISAVNKFGVSRPLDSDPVVAQIQYTIPDAPGTPEPSNVTGNS
ITLTWARPESDGGSEIQQYILERREKKSTRWVKVISKRPICETRFKVTGLTEGNEYEFHVMAENAAGVGPASGVSRLIKCREPVNPPGAPTVV
KVTDTSKTTVSLEWSKPVFDGGLEIIGYIIEMCKADLGDWHKVNVEACVKTRYTVTDLQAGEEYKFRVSAINAAGKGDSCEVTGTIKAVDRLS
APELDIDANFKQTHVVRAGASIRLFIAYQGRPTPTAVWSKPDSNLSIRADIHTTDSFSTLTVENCNRTDAGKYTLTVENNSGSKSITFTVKVL
DSPGPPGPITFKDVTRGSATLMWDAPLLDGGARIHHYVVEKREASRRSWQVVSEKCIRQILRVSDLLEGVPYYFRVSAENEYGVGEPYEMPEP
MVATEQPAPPRRLDIVDTSKSSVVLAWLKPDHDGGSRITGYLLEMRQKGSDFWVEAGHTKQMTFTVERLVENTEYEFRVKAKNDAGYSEPREA
FSSVIIKEPQIEPTADLTGITNQLITCKAGSTFTIDVPISGRPAPKVTWKLEEMRLKETDRVSITTTKDRTTLSVKDSMRGDSGRYFLTLENT
AGVKTFTITVVVIGRPGPVTGPIEVSSISAESCVLSWAEPQDNGGTDITNYIVEKRESGTTAWQLVNSSVKRTQIKVTHLTKYMEYSFRVSSE
NRFGVSKPVESAPIVAEHPFVPPSAPTRPEVYYVSANAMSIRWEEPYHDGGSKVIGYWVEKKERNTILWVKENKVPCLECNYKVTGLVEGLEY
QFRTYALNAAGVSKASEASRPVMAQNPVDAPGRPEVTDVTRSTVSLIWSAPVYDGGSKVVGYIIERKPVSEVGDGRWLKCNYTIVSDNFFTVT
ALSEGDTYEFRVLAKNAAGVISKGSESTGPITCRDEYAPPKAELDARLQGDLVTIRAGSDLVLDAAVGGKPEPKIIWTKGDKELDMCEKISLQ
YTGKRATAVIKFCDRSDSGKYTLTVKNASGTKAVSVLVKVLDSPGPCGKLTVSRVTEEKCTLAWSLPQEDGGAEITHYIVERRETSRLNWVIV
EGECPTLSHVVTRLIKNNEYIFRVRAVNKYGPGVPVESEPIVARNSFTIPSQPGIPEEVGAGKEHIIIQWTKPESDGGNDISNYLVDKREKKS
LRWTRVNKDHVVYDTRLKVTGLMEGCDYQFRVTAVNAAGNSEPSEASNFISCREPSYTPGPPSAPRVVDTTKHSISLAWTKPMYDGGTDIIGY
VLEMQEKDTDQWYRVHTNATIRNNEFTVTDLKMGQKYSFRVAAVNVKGMSEYSESTAEIEPVERLEIPDLELADDLKKTVTIRAGASLRLMVS
VSGRPPPVITWSKKGIDLASRAIIDTTESYSLLIVDKVNRYDAGKYTIEAENQSGKKSATVLVKVYDTPGPCPSVKVKEVSRDSVTITWEVPT
IDGGAPVNNYIIEKREAAMRAFKTVTTKCSKTLYRISGLIEGAMYYFRVLPENIYGIGEPCETSDAVLVSEVPLVPTKLEVVDVTKSTVTLAW
EKPLYDGGSRLTGYVLEACRAGTERWMKVVTLKPTVLEHTVISLNEGEQYLFRVRAQNEKGVSEPREIVTAVTVQDLRVLPTIDLSTMPQKTI
HVPAGRPVELVIPIAGRPPPAASWFFAGSKLRESERVTVETHTKVAKLTIRETTIKDTGDYVLELKNVTGTTSETIKVIVLVDKPGPPSGPIK
VDEIDATSVTISWGPPELDGGAPLSGYVVEQRDAHRPGWLPVSESVTRSTFKFTRLIEGNEYVFRVAATNRFGIGSYLQSEVIECRSSINIPG
PPETLQIFDVSREGMTLTWYPPEDDGGSQVTGYIVERKEVRADRWVRVNKVPVTMTRYRSTGLIEGLEYEHRVTAVNVRGTGKPSRPSKPTVA
MDPIAPPGKPQNPRVTDTTRTSVSLAWSVPEDEGGSKVTGYLIEMQKVDQHEWTKCNTTPTKIREYTLTHLPQGAEYRFRVLACNAGGPGEPA
EVPGTVKVTEMLEYPDYELDERYQEGILVRQGGVIRLTIPIKGKPFPICKWTKEGQDISKRAMIATSETHTELVIKEADRDDSGTYDLILENK
CGKKAVYIKVRVIGNPNTPEGPLEYDDIQARSVRVSWRPPADDGGADILGYILERREVPKSAWYTIDSRVRGTSLVVKGLKENVEYHFRVSAE
NQFGISKPLKSEEPVIPKTPLNPPEPPSNPPEILDVTKSSVSLSWSRPKDDGGSRVTGYYIERKETSTDKWVRHNKTQITTTMYTVTGLVPDA
EYQFRIIAQNDVGLSETSPASEPVVCKDPFDKPSQPGELEILSISKDSVTLQWEKPECDGGKEILGYWVEYRQSGDSAWKKSSKDRIKDRQFT
IGGLLEATEYEFRVFAENETGLSRPRRTAMSVKTKLTSGEAPGVRKEMKDVTTKLGEAAQLSCQIVGRPLPDIKWFRFGKELVQSRKYKMSSD
GRTHTLTVMTEEQEDEGVYTCVATNEVGEVESSSKLLLQATPQFHPGYPLKEKYYGAVGSTLRIHVMYIGRPVPAITWFRGQKLLQNSENITI
ENTEHYTHLVMKNVQRKTHAGKYKVQLSNVLGTVDTMLDVEIQDKPDKPTGPIVIEALLKNSVVISWKPPADDGGSWITNYVVEKCEAKEGAE
WQLVSSAISVTTCRIVNLTENAGYYFRVSAQNMFGISEPLEVSSVVIIKSPFEKPGAPGKPTITAVTKDSCVVAWKPPASDGGAKIRNYYLEK
REKKQNKWIAVTTDEIRETVFSVQNLIEGLEYEFRVKCENLGGESEWSEISEPVTPKSDVPIQAPHFKEELRNLNVRYQSNATLVCKVTGHPK
PIVKWYRQGKEIIADGLKYRIQEFKGGYHQLIIASVTDDDATVYQVRATNQGGSVSGTASLEVEDTVPAKIHLPKNLEGMGAVHALRGEVISI
KIPFSGKPDPVITWQKGQDLIDNNGHYQVIVTRSFTSLVFPNGVERKDAGFYVVCAKNRFGIDQKTVELDVADVPDPPRGVKVSDVSRDSVNL
TWTEPASDGGSKVTNYIVEKCATTAERWIRVGQARETRYTVINLFGKTSYQFRIIAENKFGLSKPSEPSEPTVTKEDKTRAMNYDEEVDETRE
VSMTKASHSSTKELYEKYMIAEDLGRGQFGIVHRCVETSSKKTYMAKFVKVKGTDQVLVKKEISILNIARHRNMLYLHESFESMEELVMIFEF
ISGLDIFERINTSAFELNEREIVSYVRQVCEALEFLHSENIGHFDIRPDNIIYQTRRSSTIKIIEFGQARQLKPGDNFRLQFTAPEYYAPEVH
QHDVVSTATDMWSLGTLVYVLLSGINPFLAETNQQIIENIMNAEYTFDEEAFQEISLEAMDFVDRLLVKERKSRMTASEALQHPWLKQKTERV
STKVIRTLKHRRYYHTLVKKDLNMVVSAARISCGGAIRSQKGVSIAKVKVASIEIGPVSGQIMHAVGEEGGYVKYVCRIENYDQSTQVTWYFG
VRQLENSEKYEITYEDGVATMYVKDITKFDDGTYRCKVVNDYGEDSSYAELFVKGVREVYDYYCRRTVKKLKRRTDAMRLLERPPEFTLPLYN
KTAYVGENVRFGVTITVHPEPRVTWYKSGQKIKPGDDDRKYIFESDKGLYQLTINSVTMDDDAEYTVVARNKYGEDSCKAKLTVTPHPPPSDT
TLRPMFKRLLANAECQEGQSVCFEIRVSGIPPPTLKWEKDGRPLSLGPNIEIIHEGLDYYALHIRDTLPEDTGYYRVTATNTAGSSSCQAHLQ
VERLRYVKQEFKTKEEHERHVQRQIDKTLRMAEILSGTEAVPLTQVAQEALREAAILYKPAVSTKTVKGEYRLETEEKKEERKLRMPYEVPEP
RKYKQTTIEEDQHIKQFVPMSDMKWYKKIRDQFEMPGKIDRVVQKRPKRIRLSRWEQFYVMPLPRITDQYRPKWRIPKLSQDDLEMVRPARRR
TPSPDYYYYYRPRRRSLGDISDEELLLPIDDYLAMKRTEEERLRLEEELELGFSASPPSRSPPRFELSSLRYSSPQAHVKVEEARRDFRYSTY
HIPTKEETSTSYAELRERHARASHRQAHQRQRIMAEREDHELLRPATTTQRLLEYKSELDHLAKEAKSRKKSRRQREVTEITEIEEEYEISKH
AQRETSSSVSRLLRRRRSLSPTYIELMRPVSELIRPRPRPAEEYEDEEEEEEEDVERRSPTPERTRPRSPSPVSSERSLSRFERSARFDIFSR
YESMKAALKTQKTSERKYEVLSQQPFTLDHAPRITLRMRSHRVPCGQNTRFILNVQSKPTAEVKWYENGVELQESSKIHYTNTSGVLTLEILD
CHIDDSGTYRAVCTNYKGEASDYATLDVTGGDYTTYASQRRDEQVPRSVFPELTRTEAYAVSSFKKTSEMEASSSVREMKSLMTETRESLSSY
EHHASAEMKSAAIEEKSLEEKSTHRKIKTTLAARILTKPRSITVYEGESARFSCDTDGEPVPTVTWLRGGQVISTSARHQVTTSKYKSTFEIS
SVQASDEGNYSVVVENSDGRQEAQFTLTVQKARVTEKAVTSPPRVKSPEPRVKSPEGAKSPKRVKSPEPVTPHPKAVPPTETKPTPTEKVQQK
PVAAPPKIIQSLKAEASKDIAKLTCVVESSALCAKEVTWYKDGRRLKENGHFQFHYSADGTYELKILNLAESDRGEYVCEVSGEGGTSKTNFQ
FVGQAFKSIHEQVSSISETNKKAAPKTAEPTETKKTEPKAPAPISTKPVIVTGLQDTTVSSDSVAKFAVKVTGEPQPTVIWTKDGKAISQGGK
YKLSEDKGAFFLEIHKTDTSDSGLYTCTITNSAGSVSSSCKLTIKVVEDTEIQKVSAQKTSEITSQKKASVQEEISKKALISEEIKTSEVKSH
EKLALKEEASTVLISEKVKKSEAASLEKSVVHEEITKTSQASEEIRTHAEIKAFSTQMSITAGQKVTLKANIAGATDVKWVLNGVELSNSDEY
RYGISGSDQTLTIRQAGHKDEGILTCIGKTSQGIIKCQYDLTLSKELSDAPAFISQPRSQNVNEGQNVLFSCEISGEPSPEIEWFKNNLPISI
SSNISVSRSRNVYSLEIRNASVSDSGKYTIKAKNFHGQCSATASLTVLPLVEEPPREVVLRTSGDTSLQGSFSSQSVQMSASKQEASFSSFSS
SSASSMTEMKFASMSAQSMSSMQESFVEMSSSSFMGKSSMTQLESSTSRMLKAGLRGIPPKIEALPSDISIDEGKVLTVACAFTGEPTPEITW
SRGGRTIHDQEQRGRFMENTDDL (SEQ ID NO: 46)
>NP_990445.1 troponin T, slow skeletal muscle [Gallus gallus]
MSEAEEEYEEEQPEEEEEAAAAAEEEEEEEAEASKPHEEPEEERPRPRPVVPQLAPPKIPEGERVDFDDIHRKRMEKDLLELQTLIDAHFEQR
RREENELVALMERIERRRAERNEQLRSRTEKERERQARLAEEKLRKEEEEAKKRAEDDAKKKKVLSNMPHFGGYLAKAEQRRGKRQTGREMKL
RILAERKKPLHIEHMREDELRAKAKELHDWIQQLESEKFDLMEKLRRQKYEINVLYNRISHAQKFKKVVGKGRVGGRWK
(SEQ ID NO: 47)
>tr|A0A1D5PLV5|A0A1D5PLV5_CHICK Uncharacterized protein OS = Gallus gallus OX = 9031
GN = TNNT1 PE = 4 SV = 1
AAEASKPHEEPEEERPRPRPVVPQLAPKIPEGERVDFDDIHRKRMEKDLLELQTLIDAHFEQRRREENELVALMERIERRRAERNEQLRSRTE
KERERQARLAEEKLRKEEEEAKKRAEDDAKKKKVLSNMPHFGGYLAKAEQRRGKRQTGREMKLRILAERKKPLHIEHMREDELRAKAKELHDW
IQQLESEKFDLMEKLRRQKYEINVLYNRISHAQKFKKVVGKGRVGGRWK (SEQ ID NO: 48)
>XP_419242.3 troponin I, slow skeletal muscle [Gallus gallus]
MPEPRERKSKITASRKLLLKSLMLAKAKEEWEQEIVDKQSEKERYLSERITPLHTSGLSLSQLQDLCRELHEKVEIVDEERYDIEAKCNHNTR
EIKDLKLKVLDLRGKFKRPPLRRVRVSADAMLRALLGSKHKVSMDLRANLKSVKKEDTEKERPVEVGDWRKNVEAMSGMEGRKKMFDAAKSPT
GQ (SEQ ID NO: 49)
>tr|F1NUT9|F1NUT9_CHICK Uncharacterized protein OS = Gallus gallus OX = 9031 GN = TNNI1
PE = 4 SV = 3
MLAKAKEEWEQEIVDKQSEKERYLSERITPLHTSGLSLSQLQDLCRELHEKVEIVDEERYDIEAKCNHNTREIKDLKLKVLDLRGKFKRPPLR
RVRVSADAMLRALLGSKHKVSMDLRANLKSVKKEDTEKERPVEVGDWRKNVEAMSGMEGRKKMFDAAKSPTGQ (SEQ ID NO: 50)
>tr|B5DH00|H5DH00_SALSA Fast myotomal muscle troponin-T-1 OS = Salmo salar OX = 8030
GN = TNNT3 PE = 2 SV = 1
MSDTEEVEAQKPQFKVPKIPDGDKVDFDDIQKKRQNKDLIELQALIDAHFEHRKKEEEELIALKERIEKRRAERAEQNRIRSEKEKERAARRE
EERLKREEADAKKKADEDAKKKSALSSMGSNYSSHLQKADSKRGGKKETEREKKKKILAGRRKALNIDHLNEEKLKEKAKELHEWMQTLESEK
FDHIERLKRQKYEVTTLRKRVEELSKFSKKGKTVRRK (SEQ ID NO: 51)
>tr|O57559|O57559_CHICK Troponin Tv ariant TnTx7-e16 OS = Gallus gallus OX = 9031 GN = TNNT3
PE = 2 SV = 1
MSDTEEVEHGEAHEAEEVHEEAHHEEAHHEEAHHEEAHHAEAHHAEAHHEEAHAHAEEVHEPAPPPEEKPRIKLTAPKIPEGEKVDFDDIQKK
RQNKDLIELQALIDSHFEARRKEEEELVALKERIEKRRAERAEQQRIRAEKEKERQARLAEEKARREEEDAKRKAEDDLKKKKALSSMGASYS
SYLAKADQKRGKKQTARETKKKVLAERRKPLNIDHLNEDKLRDKAKELWDWLYQLQTEKYDFAEQIKRKKYEILTLRCRLQELSKFSKKAGAK
GKVGGRWK (SEQ ID NO: 52)
>tr|A0A28713D71|A0A28713D71_PIG Myotubularin 1 OS = Sus scrofa OX = 9823 GN = MTM1 PE = 3
SV = 1
MASAPTSKYNSHSLENESIKRTSRDGVNRDMGEAVPRLPGETPITDKEVIYICPFNGPIKGRVYITNYRLYLRSLETDSALILDVPLGVISRI
EKMGGATSRGENSYGLDITCKDMRNLRFALKQEGHSRRDMFEILTRYAFPLAHSLPMFAFLNEEKFNVDGWTVYNPVEEYRRQGLPNHHWRIT
FINKCYELCDTYPALLVVPYRAADEDLRRVATFRSRNRIPVLSWIHPENKTVIVRCSQPLVGMSGKRNKDDEKYLDVIRETNRQVNKLTIYDA
RPNVNAVANKATGGGYESDDAYENAELFFLDIHNIHVMRESLKKVKDIVYPNVEESHWLSSLESTHWLEHIKLVLTGAIQVADRVSSGKSSVV
VHCSDGWDRTAQLTSLAMLMLDSFYRSIEGFEILVQKEWISFGHKFASRIGHGDKNHADADRSPIFLQFIDCVWQMSKQFPTAFEFNEHFLIT
ILDHLYSCRFGTFLYNCESARERQKVTERTVSLWSLINSNKDKFKNPFYTKEINRVLYPVASMRHLELWVNYYIRWNPRIKQQQPNPVEQRYM
ELLALRDEYIKRLEELQLANSAKLSEPAAAPSSPSQMVSHVQTHF (SEQ ID NO: 53)
>sp|Q4PS85|MYOZ1_PIG Myozenin-1 OS = Sus scrofa OX = 9823 GN = MYOZ1 PE = 2 SV = 1
MPLSGTPAPNKKRKSSKLIMELTGGGQESSGLNLGKKISVPRDVMLEELSLLTNRGSKMFKLRQMRVEKFIYENHPDVFSDSSMDHFQKFLPT
VGGQLGTAGQGFSYSKGSSGGQAGGSSSAGQYGSGQQHHHQGSGSGSGGAGGPGSQTGRGGDAGTTGVGETGTGDQAGGEGKHITVFKTYISP
WEKAMGVDPHQKVELGIDLLAYGAKAELPQYKSFNRTAMPYGGYEKASKRMTFQMPKFDLGPLLSEPLVLYNQNLSNRPSFNRTPIPWLSSGE
PVDYNVDIGIPLDGETEEL (SEQ ID NO: 54)
>sp|P19352|TPM2_CHICK Tropomyosin beta chain OS = Gallus gallus OX = 9031 GN = TPM2 PE = 1
SV = 1
MEAIKKKMQMLKLDKENAIDRAEQAEADKKQAEDRCKQLEEEQQGLQKKLKGTEDEVEKYSESVKEAQEKLEQAEKKATDAEAEVASLNRRIQ
LVEEELDRAQERLATALQKLEEAEKAADESERGMKVIENRAMKDEEKMELQEMQLKEAKHIAEEADRKYEEVARKLVVLEGELERSEERAEVA
ESKCGDLEEELKIVTNNLKSLEAQADKYSTKEDKYEEEIKLLGEKLKEAETRAEFAERSVAKLEKTIDDLEDEVYAQKMKYKAISEELDNALN
DITSL (SEQ ID NO: 55)
>sp|Q3ZC09|ENOB_BOVIN Beta-enolase OS = Bos taurus OX = 9913 GN = ENO3 PE = 2 SV = 1
MAMQKIFAREILDSRGNPTVEVDLHTAKGRFRAAVPSGASTGIYEALELRDGDKSRYLGKGVLKAVEHINKTLGPALLEKKLSVVDQEKVDKF
MIELDGTENKSKFGANAILGVSLAVCKAGAAEKGVPLYRHIADLAGNPELILPVPAFNVINGGSHAGNKLAMQEFMILPVGASSFREAMRIGA
EVYHHLKGVIKAKYGKDATNVGDEGGFAPNILENNEALELLKTAIQAAGYPDKVVIGMDVAASEFYRNGKYDLDFKSPDDPARHISGEKLGEL
YKNFIKNYPVVSIEDPFDQDDWATWTSFLSGVNIQIVGDDLTVTNPKRIAQAVEKKACNCLLLKVNQIGSVTESIQACKLAQSNGWGVMVSHR
SGETEDTFIADLVVGLCTGQIKTGAPCRSERLAKYNQLMRIEEALGDKAVFAGRKFRNPKAK (SEQ ID NO: 56)
>sp|A6QLT4|MTM1_BOVIN Myotubularin OS = Bos taurus OX = 9913 GN = MTM1 PE = 2 SV = 2
MASAPTSKYNSHSLENESIKRTSRDGVNRDVGETLPRLPGEIRITDKEVIYICPFNGPIKGRVYITNYRLYLRSLETDSALILDVPLGVISRI
EKMGGATSRGENSYGLDITCKDLRNLRFALKQEGHSRRDMFEILTRYAFPLAHSLPIFAFLNEEKFNVDGWTVYNPVEEYRRQGLPNHHWRIT
FINKCYKLCDTYPALLVVPYRASDEDLRRVATFRSRNRIPVLSWIHPENKTVIVRCSQPLVGMSGKRNKEDERYLDVIRETNRQVNKLTIYDA
RPNVNAVANKATGGGYESDDVYHNAELFFLDIHNIHVMRESLKKVKDIVYPNVEESHWLSSLESTHWLEHIKLVLTGAIQVADRVSSGKSSVV
VHCSDGWDRTAQLTSLAMLMLDSFYRSIEGFEILVQKEWISFGHKFASRIGHGDKNHADADRSPIFLQFIDCVWQMSKQFPTAFEFNERFLIT
ILDHLYSCRFGTFLYNCESAREKQKVTERTVSLWSLINSNKDKFKNPFYTKEINRVLYPVASMRHLELWVNYYIRWNPRIKQQQPNPVEQRYM
ELLALRDEYIKRLDELQLANSAKLSDPSASPSSPSQMMPHVQTHF (SEQ ID NO: 57)
>sp|Q7YS81|MYOG_BOVIN Myogenin OS = Bos taurus OX = 9913 GN = MYOG PE = 2 SV = 2
MELYETSPYFYQEPHFYDGENYLPVHLQGFEPPGYERAELSLSPEARVPLEDKGLGPAEHCPGQCLPWACKVCKRKSVSVDRRRAATLREKRR
LKKVNEAFEALKRSTLLNPNQRLPKVEILRSAIQYIERLQALLSSLNQEERDLRYRGGGGPQAAVPSECSSHSASCSPQWGSALEFGPNPGDH
LLPADPTDAHNLHSLTSIVDSITVEDVAAAFPDETIPN (SEQ ID NO: 58)
>sp|P49812|MYOG_PIG Myogenin OS = Sus scrofa OX = 9823 GN = MYOG PE = 3 SV = 1
MELYETSPYFYQEPHFYDGENYLPVHLQGFEPPGYERTELSLSPEARVPLEDKGLGTPEHCPGQCLPWACKVCKRKSVSVDRRRAATLREKRR
LKKVNEAFEALKRSTLLNPNQRLPKVEILRSAIQYIERLQALLSSLNQEERDLRYRGGGGPQPGVPSECSSHSASCSPEWGSALEFGPNPGDH
LLTADPTDAHNLHSLTSIVDSITVEDVAVAFPDETMPN (SEQ ID NO: 59)
>sp|P31696-5|AGRIN_CHICK Isoform 5 of Agrin OS = Gallus gallus OX = 9031 GN = AGRN
MGGSGAAATLALGLALGLALGGWANCPERELQRREEEANVVLTGTVEEIMNVDPVHHTYSCKVRVWRYLKGKDIVTHEILLDGGNKVVIGGFG
DPLICDNQVSTGDTRIFFVNPAPQYMWPAHRNELMLNSSLMRITLRNLEEVEHCVEEHRKLLADKPNSYFTQTPPTPRDACRGMLCGFGAVCE
RSPTDPSQASCVCKKTACPVVVAPVCGSDYSTYSNECELEKAQCNQQRRIKVISKGPCGSKDPCAEVTCSFGSTCVRSADGQTAGCVCPASCS
GVAESIVCGSDGKDYRSECDLNKHACDKQENVFKKFDGACDPCKGILNDMNRVCRVNPRTRRVELLSRPENCPSKREPVCGDDGVTYASECVM
GRTGAIRGLEIQKVRSGQCQHQDKCKDECKFNAVCLKRWHARCSCDRITCDGTYRPVCARDSRTYSNDCERQKAECHQKAAIPVKHSGPCDLG
TPSPCLSVECTFGATCVVKNREPVCECQQVCQGRYDPVCGSDNRTYGNPCELNAMACVLKREIRVKHKGPCDRCGKCQFGAICEAETGRCVCP
TECVPSSQPVCGTDGNTYGSECELHVRACTQQKNILVAAQGDCKSCGTTVCSFGSTCVGGQCVCPRCEQQPLAQVCGTDGLTYDNRCELRAAS
CQQQKSIEVAKMGPCEDECGSGGSGSGDGSECEQDRCRHYGGWWDEDAEDDRCVCDFTCLAVPRSPVCGSDDVTYANECELKKTRCEKRQNLY
VTSQGACRALTTTPPPLPVVHCSQTIYGCCPDNMTLALGVGAAGCPSTCQCNPYGSYGGTCDPATGQCSCKPGVGGLKCDRCEPGFWNFRGIV
TDSKSGCTPCNCDPVGSVRDDCEQMTGLCSCKTGITGMKCNQCPNGSKMGMAGCEKDPSAPKSCEEMSCEFGATCVEVNGFAHCECPSPLCSE
ANMTKVCGSDGVTYGDQCQLKTIACRQGQLITVKHVGQCHESITHTSHTMPPTPLPTLPLDKLIVPPPLQLTTQAPEPTELATTSLLMEASPT
TRSHPTTRRVTTTRPVTTPWMTHGVLKTTVRPLSTSPVVLATTQPPYAESGSAEGSGDQEMSISGDQESSGAGSAGEEEVEESQVTPTPAIER
ATCYNTPLGCCSDGKTAAADAEGSNCPATKVFQGVLILEEVEGQELFYTPEMADPKSELFGETARSIESALDELFRNSDVKNDFKSIRVRDLG
QSSAVRVIVESHFDPATSYTAADVQAASLKQIRASKKRTILVKKPQQEHVKFMDFDWIPRIFTTTITTTTATTMAPATTRRHTTASAATTAHI
LRQDTVGHPSAKLAAPASTRRPTSTLPTTARRKPTRQPPSTTKKPSRPCDSHPCLHGGTCEDDGREFTCRCPAGKGGAVCEKPIRYFIPSEGG
KSYLAFKMMKAYHTVRIAMEFRATELSGLLLYNGQNRGKDFISLALVGGFVELRFNTGSGTGVITSKVRVEPGKWHQLVVNRNRRSGMLAVDG
EHVSGESPTGTDGLNLDTDLFVGGAPEDQMAVVAERTAATVGLKGSIRLLDVNNQMYDLREKGSDVLYGSGVGECGNDPCHPNPCHHGASCHV
KEAEMFHCECLHSYTGPTCADERNPCDPTPCHISATCLVLPEGGAMCACPMGREGEFCERVTEQDHTMPFLPEFNGFSYLELNGLQTLFLTCR
QMSMEVVFLAKSPSGMIFYNGQKTDGKGDFVSLALHDGYLEYRYDLGKGAAVLRSKEPVPLNTWISVLLERSGRKGVMRINNGERVMGESPVP
HAFLNLKEPFYVGGAPDFSKLARAAAISTSFYGAVQRISIKGVPLLKEQHIRSAVEISTFRAHPCTQKPNPCQNGGTCSPRLESYECACQRGF
SGAHCEKVIIEKAAGDAEAIAFDGRTYMEYHNAVTKSEKALQSNHFELSIKTEATQGLILWSGKGLERSDYIALAIVDGFVQMMYDLGSKPVV
LRSTVPINTNHWTHIKAYRVQREGSLQVGNEAPITGSSPLGATQLDTDGALWLGGMERLSVAHKLPKAYSTGFIGCIRDVIVDRQELHLVEDA
LNNPTILHCSAK (SEQ ID NO: 60)
>sp|P21566|COF2_CHICK Cofilin-2 OS = Gallus gallus OX = 9031 GN = CFL2 PE = 1 SV = 2
MASGVTVNDEVIKVFNDMKVRKSSTPEEIKKRKKAVLFCLSDDKKQIIVEEAKQILVGDIGDTVEDPYTAFVKLLPLNDCRYALYDATYETKE
SKKEDLVFIFWAPESAPLKSKMIYASSKDAIKKKFTGIKHEWQVNGLDDIKDRSTLGEKLGGNVVVSLEGKPL (SEQ ID NO: 61)
>sp|Q679P3|PDLI7_CHICK PDZ and LIM domain protein 7 OS = Gallus gallus OX = 9031 GN = PDLIM7
PE = 1 SV = 1
MESYKVMLNGPAPWGFRLQGGKDFSMPLSISRLTPGGKAAQAGVGVGDWVLYIDGESTGTMTHIEAQNRIRACGDRLCLTLSRAQNHLGKPQK
DSLPCSEPPKYNFAPSTALNKTARPFGASSPPNPRPGLVTKPVTYVPLAPACTPQHNGQVSVPDPSPGAAMKTEPGLAPRTPAATPGPTSRPP
WAVDPSFAERYAPDKTSTVLSKHSQPATPTPMQNRSSIVQAAQQAPESPGRTPLCYKCNKIIRGRYLVALGHYYHPEEFTCCQCRKVLDEGGF
FEEKGSIFCPKCYDTRYAPSCAKCKKKITGEVMHALKMTWHVQCFTCAACKTPIRNRAFYMEEGQPYCERDYEKMFGTKCRGCDFKIDAGDRF
LEALGFSWHDTCFVCAICQTNLEGKTFYSKKDKPLCKSHAFSHV (SEQ ID NO: 62)
>tr|F1NQD9|F1NQD9_CHICK Radixin OS = Gallus gallus OX = 9031 GN = RDX PE = 4 SV = 3
MPKPINVRVTTMDAELEFAIQPNTTGKQLFDQVVKTVGLREVWFFGLQYVDSKGYSTWLKLNKKVTQQDVRKENPLQFKFRAKFFPEDVSEEL
IQEITQRLFFLQVKEAILNDEIYCPPETAVLLASYAVQSKYGDYNKEIHKLGYLANDRLLPQRVLEQHKLTKEQWEERIQNWHEEHRGMLRED
SMMEYLKIAQDLEMYGVNYFEIKNKKGTELWLGVDALGLNIYEHDDKLTPKIGFPWSEIRNISFNDKKFVIKPIDKKAPDFVFYAPRLRINKR
ILALCMGNHELYMRRRKPDTIEVQQMKAQAREEKHQKQLERAQLENEKKKREIAEKEKERIEREKEELMERLRQIEEQTMKAQKELEEQTRRA
LELDQERKRAKEEAERLEKERRAAEEAKAALAKQAADQMKNQEQLAAELAEFTAKIALLEEAKKKKEEEASEWQHKAFAAQEDLEKTKEELKS
VMSAPPPPPPPPVIPPTENEHDEHDENNAEASAELSSDGVMNHRSEEERVTETQKNERVKKQLQALSSELAQARDETKKTQNDVLHAENVKAG
RDKYKTLRQIRQGNTKQRIDEFEAM (SEQ ID NO: 63)
>XP_025008315.1 nebulin isoform X22 [Gallus gallus]
MEEEEYEEVVEYYIEETIVEEGEPYEVVTEITDSTSTEFTGPTTITRTIEYEKTSGEGAATPVRKKTIRTKMDTSKFLTPYLQHSNKMKDLFS
ENKYKEKFNKERGKPYASTIDTPEIRRIKKVQEQLSEVKYRMAGEAARTICHVDEKAWDIEHAKKVSQQVSKVLYKQNWEENKDKYLLPPDAP
ELVNAIKNTAMFSKKLYTEDWEGDKTLFYPYNDSPELRRVAQAQKALSDIVYKKGHDERKSKYTSLPDPPDVEQAKKVTRQLSDIIYHDDYKN
KIKGKWSQTPCYDVVIAKMNAENLSMKKYQEDFENVKDQIYFMQTETPEYEANKRVSDNVSKIKYRADYEKNKAIADYNVLPATENPLLRQLK
TAGDVLSDKLYKEAYERSKGTSMNYCETPKFQTDNALKNFSDVKYKDAYQKNILGHYLGSFEDPHQIHCMKVEAMKSDKNYKADYEEEKTKCY
FPQTITQEYEAIKKLEQCKDHTYKKHPDQIKFTPVTDSPVQKQAEINSKQLSDKLYRSSGEEVKHKYTLPPDVPQFIQARYNAANVSDAYYKQ
DYHDLIAKGNNVSLDAIPITRAKASRNIASDYKYKEAYEKAKGQQVGFKSLQDDPKLVHYMHVAKIQSDREYKKDYEKSKTNYHTPPDTFSIQ
AAKKSQDVASTAHYKNLIHHYTYLPDAMDVELAKNMMQIQSDNVYKQDYNSWFKGIGWSPLGSLDVEKAKKAGDALNEKKYRQHPDTIKFTSV
PDSMTMVLAQHNTKQLSDVAYKQEGEKVKHKYKLDPDVPQFIQARVNAFNLSDANYKADWKKTIAKGYDLKPDAIPIIAAKASRNIASDYKYK
ESYEKDKGRQVGYRSLQDDPKLVHYMHVAKMQSDREYKKDYEVTKTKYHTPLDMFSVTAAKKAQEAVTNTGYKQLIHHYTLLPDSVNLELSRN
MMQLQSDNMYKADFNNWLRGVGWLPIQSLEVEKAKKASEILSEKKYRQHPDKLKYSIPLDAMEQVLAKQNAKTMNKRLYTDKWNKEKTSIHVM
PDTPEILQSRVNQITMSNKLYKAGWEEDKKKGYDMRPDAIPIKAAKTSQDIASDYKYKLAHEKAKGKHIGFRSLEDDPKLVHFMQVAKMQSDR
EYKKDYEKAKTNFHTPVDMLSVVAAKKAQEVATNANYKNLIHVYNVLPDAMSLELAKNMMQIQSNNQYRAEYDESMKGVGWMPLGSLEAEKNK
KAMEILSEKKYRQHPDKLKYSVPVDSMNMALALHNAKIMDEHQYKQAWEEDKKKVHMTPDIPQFALAKANAFNISDKMYRHSFEEARKKGYDL
RSDAIPIKAAKASRDIASDYKYKLGYEQDKGKLVGFRSLQDDPKLVHYMQVAKMQSDREYKKAYETSKTHYQTPSDALSIMAAKEAQDRVTNA
NYKRLIHHYMLLPDAMSFELYRNMNQIQSNNEYKQDYNEWFKGIGWSPAGSLDVEKSKKATEIASDQKYRQHPSIFPFTKQIDAMDMVLAKHN
ADIMNKHAYTQAWEKDKTQVHVMPDTPDILQAKQNKANYSQKQYKLDWQEMIKKGYDLTPEAISVKAAKASRDIASDYKYKEGYRKQQGHHIG
FRSLQDDPKMMWSMQVAKMQSEREYKKDFEKWKTKFNMPVDMLGFLLAKKCQELVSDIDYKHMLHRWTCLPDQNDVTQAKRVYELQSDNLYKS
DLQWLRGIGWSPLGSLESEKNKKASEILSEKKYRQHPDTIKFTSIPDAMNIILAKSNAKNRSDILYREAWDKDKTQVHIMPDTPEILLAKSNL
INTSDKHYKLGYEELRRKGYDLPPDAIPLKSAKASRDIASEYQYKTAYRKQLGHHVGARNIEDDPKMMWSMHVAKIQSDREYKKAFEKTKTHF
SSPVDMLGIVLAKKCQELVSDVDYKHLLHRWTCLPDQNDVVQARKVYDLQSDNVYKSDLQWLRGIGWSPLGSLDEEKNKRASMILSDKKYRQH
PDTIKFTSLPDSMPMVLAKHNSEIMNHRSYIAAWEKDKTSIHIMPDTPGILLAQQNKVNYSEKMYRLAMEEDKKKGYDLRADAIPIKAAKASR
DIASDYKYKEGYRKQLGHHIGARNIEDDPKMMWSMHVAKVQSDREYKKAFEKTKTHFSSPVDMLGIVLAKKCQELVSDVDYKHLLHRWTCLPD
QNDVVQARKVYDLQSDNVYKSDLQWLRGIGWSPLGSLDEEKNKRASMILSDKKYRQHPDTIKFTSLPDSMPMVLAKHNSEIMNHRSYIAAWEK
DKTSIHIMPDTPGILLAQQNKVNYSEKMYRLAMEEDKKKGYDLRADAIPIKAAKASRDIASDYKYKEGYRKQLGHHIGARNIEDDPKMMWSMH
VAKVQSDREYKKAFEKTKTHFSSPVDMLGIVLAKKCQELVSDVDYKHLLHRWTCLPDQNDVVQARKVYDLQSDNVYKSDLQWLRGIGWSPLGS
LDEEKNKRASMILSDKKYRQHPDTIKFTSLPDSMPMVLAKHNSEIMNHRSYIAAWEKDKTSIHIMPDTPGILLAQQNKVNYSEKMYRLAMEED
KKKGYDLRADAIPIKAAKASRDIASDYKYKEGYRKQLGHHIGARNIEDDPKMMWSMHVAKVQSDREYKKAFEKTKTHFSSPVDMLGIVLAKKC
QELVSDVDYKHLLHRWTCLPDQNDVVQARKVYDLQSDNVYKSDLQWLRGIGWSPLGSLDEEKNKRASMILSDKKYRQHPDTIKFTSLPDSMPM
VLAKHNSEIMNHRSYIAAWEKDKTSIHIMPDTPGILLAQQNKVNYSEKMYRLAMEEDKKKGYDLRADAIPIKAAKASRDIASDYKYKEGYRKQ
LGHHIGARNIEDDPKMMWSMHVAKIQSDREYKKAFEKTKTHFSSPVDMLGIVLAKKCQELVSDVDYRHYLHQWICLPDQNDVIHARKAYDLQS
DNFYKSDLEWMRGIGWVPIGSLDIEKAKRAGQILSDKVYRQPPDTIKFTSVTDSLEMTLAKHNAEMMNKRLYTEAWDKDKTQIHIMPDTPEIT
LAKQNMHNYSEKLYKQAMEEAKKKGYDLRSDAIPIQAAKASRQIASDYKYKEGYRKQLGHHIGARNIEDDPKMMWSMHVAKIQSDREYKKAFE
KTKTHFSSPVDMLGIVLAKKCQELVSDVDYRHYLHQWICLPDQNDVIHARKAYDLQSDNFYKSDLEWMRGIGWVPIGSLDVEKAKRAGQILSD
KVYRQPPDTIKFTSVTDSLEMTLAKHNAETMNKRLYTEAWNKDKTTIHVMPDTPEILLAKQNQAHYSQKMYKLALEESKKKGHDLRFDAIPIQ
AAKASREIASDYKYKEGYRKQLGHHIGARNIEDDPKMMWSMHVAKIQSDREYKKAFEKTKTHFSSPVDMLGIVLAKKCQELVSDVDYRHYLHQ
WICLPDQNDVIHARKAYDLQSDAVYKSDLEWLKGIGWVPIGSLDVEKAKKAGEILSDRKYRQPADQIKFTSVTDSLAMMLAKHNAEIMNKRLY
TEAWDADKTSIHVMPDTPTILLAKANAANVSHKHYVQAWEDAKKKGYDMRADAIPIRSAKASRDIASDYKYKEAHEKQKGHYIGCRTAKEDPK
LSWAARAMLLQNDRIYRKAYNDSKAHIHMPVDAMSLQAAKECQTLVSDVDYRHYLHQWTCLPDQNDVMHARKAYDLQSDNVYKSDLEWLRGIG
WLTEGSVDVIKAKKAQEILSDRLYRTQPDKMKFTSITDTPDVVQAKINAMQLSNHLYREVWDKDKTQISIPSDTPELLQSKLNALNISNKHYQ
KAWDEAKAKNYDLRADAIPIKHAKASRDIASEYKYKEAHEKQKGHYIGCRTAKEDPKLSWAARAMLLQNDRIYRKAYNDSKAHIHMPVDAMSL
QAAKECQTLVSDVDYRHYLHQWTCLPDQNDVMHARKAYDLQSDNVYKSDLEWLRGIGWLTEGSVDVVKAKKAQEILSDRLYRTQPDKMKFTSV
TDAPDVVQAKINAMQLSNRLYREAWDKDKTQISIPSDTPEMLQSKVNALNISNKHYQKAWDEAKAKNYDLRADAIPIKHAKASRDIASEYKYK
EAHEKQKGHYIGCRTAKEDPKLSWAARAMLLQNDRIYRKAYNDSKAHIHMPVDAMSLQAAKECQTLVSDVDYRHYLHQWTCLPDHNDVVHARK
AYDLQSDAVYKSDLEWLRGIGWLPNDSPGVQRVKHAQDLLSDKVYRTPIDSVKYTSVVDSPDILLAKMNAEQLSIPKYKEAWEKDKTMIHIMP
DTPEITLARSNAHNYSQKLYKEAWDEVKMSYDLRADAIPIKAAKASREIASDYKYKLDHEKQKGHYVGVPNAKADTKIRFALGIGKVQSELEY
KKHFAKWKTQCHLPVDMLSIQSAKHGQSLVSDVDYRHYLHQWICLPDQNDVIHARKAYDLQSDAVYKSDLEWLRGIGWLPNDSLGINHVKHAG
DLLNERKYRTKAETLHFTPVADRVDYVTAKKSGEILSDIKYHKDWNEVKSNYTLTDTPQLDMAREAARILNQSLYKESWEKEKATGYLLPPDT
VQIRHAKHSNDVQSELKYKADYVKQRGHYVGVASMRDDPKLVWFEHAGEIQNDRLYKSNYHKTKSKIHIPADIMSVVAAKECQALVSDVDYRH
YLHQWTCHPDQNDCIQARKAYDLQSDNIYKSDLEWLRGCGWIPLGSVEHKKVKHAQELINKRAYTKDAIENFSKYTSVVDTPDIVLAKINSVN
QSDLKYKETFNLEKGQYIGSDDTPELNHARDMSLLYSDKLYKRDWEVCKPIGYTLDAKYIPLVGAKHANYVNSELKYKEIYEKLKGHYLAGKD
IGDFPSVVHSLAFQKIRSALAYRKNYEDTKTRVHIPSDMMNHVLAKKCQYILSDLEYRTYLHHWNCSPEEHDVIQARRAQEILSDVVYKDDLN
WLKGIGCYVWDTPQILHAKKSYDLQSQIKYTAAGKENFQNFGVVTDTPVYVTAVQSGINASDVKYKEDYHKTKDKYTTVTETADSERVQNLKH
LFSNNLYKEAWDRVKATSYIMPSDAVSLARAKELKHNASIVKYREEYDKFKALYTLPRSVEDDPNTARCLRVGKLNIDRLYKETYEKNKAKVH
IIPDMVDIIAAKDAQKKISEIDYRTHLHDWICLPDLQINAHVRKVADQISDVVYKDDLNWLKGIGCFVWDTPEILHAKHAYDLRSDIKYKSDA
DKMKSKYTVVMDTPVYVQNILSGLNASEVIYRGDYLKKVRGKMIPTDKTVDLQRAHHANKIQSENLYRWAGLKALPTGYSLPKDTPGFQHAKH
VQHIGSDLKYKEAYEHMKAKGYTLGPNDVGFENVKKVNQVINERLYRATYHKNKDKIHTTPDTPEIRQVRATQEAVSDLIYKSDFFKLQGHLI
SLPFTPQVLHCRYVGDITSDNKYKEDLKWLQGLGCFLYDTPDMVRARQLRKLWSNYVYTDSAKKMRDKYSVVLDTPGYRTVQELKTHLSDLVY
RAAGKELKTKYTSVLNTPDFLRAKEGQRIQSQYLYVALATKERPHHHAGNQTPAFTHARHVKDMVSETKYKIQYEKMKDKYTPVLDTPILIRA
KRAYLNASDLRYKETFENTKGKYHTVKDALDIVYHRKVTDDISSVKYKENYMSQLGIWRSIPDRPEHFHHRAVTDAISDVKYKEDLSWLRGIG
CYAWDTPDFALAEKNKVLYSGHKYKETFEKTKSHFKYVADSPINRHFKHATQLLDANSYKSLAKMLLKQGCNEILRPDILTALYNSYLWSQVE
YKKDYEKKKDKYTTVVDTPENIRTAKVNKQISDIIYKLEYNKAKPKGYTTIHDTPMLLHVRKVKDRISDLKYKELYERNKSHCNVVADSVHIK
TPRHAYKLNSNLDYKKKYEAAKAHWHWIADRPDFVQAAKSSLQQSDYEYKLDREYLKGCKLSVTDDKNTVLALNNAILASDIKYKEKHNKARG
TCLVVPDTPQILLAKNVSSLVSENKYKEHSKKQLPRGSYTTLPETRDTAHVKEVTKNVSDTNYKKKFVKEKGKSNYSIMLEPPEVKHAMEVAK
KQSTVEYKKDAKSKLHYTPIADRPDIKKATQAAKLISDIEYKKRGEAGLGVTMLGRPDIELAKEVSKLTSQVKYKENFSKEKGKKPKYDLKEA
KIYKTMKDAHNIASEVKYKADLKKLHKPVTDMSESLIMNHVLNTSQLASAVKYKEKYEKEKGKPMLDFETPTYLTAKESQLMQSEKEYRKDLE
EGVKGKGLSVLEETPDMLRAKNATQILNEKEYKKALELEIKGKGLSELALETPDFVRAKNATDIASQIKYKQLAEMEKANYTSVVDTPEIIHA
QQVKNLSSQKKYKEEAEKTMPYYVPVADTPEMQRVRENQKNFSTLQYQWDLQNSKGKVTVVQDTPEMLRVKENQKNFSSIKYKESIGKGTPIP
DLPEVKRVKETQKHISSVLYKEHLAKGTPTPMTPEMERAKRNQENISSVLYSDSFRKQVQGKAAYVLDTPEMRRVRETQKHISTVKYHEDFEK
NKGTFTPVVTDPITERVKKNMHDFSDISYRGIQRRVVEMEQKRVDQDQENLTGLRVWRTNPGSVFDYDPAEDNIQSRSLHMISVQAQRRSREH
SRSASALSISGGDEKSEPSEGVNQHLSYYSSGGFFTTTATVGYKHAKTIELPQQRSASVATQQTTVSSVPSHPSTAGKTYRAMYDYTAADADE
VSFKDGDTIVNVQAIDEGWMYGTVQRTGKTGMLPANYVEAV (SEQ ID NO: 64)
>XP_025008310.1 nebulin isoform X17 [Gallus gallus]
MEEEEYEEVVEYYIEETIVEEGEPYEVVTEITDSTSTEFTGPTTITRTIEYEKTSGEGAATPVRKKTIRTKMDTSKFLTPYLQHSNKMKDLFS
ENKYKEKFNKERGKPYASTIDTPEIRRIKKVQEQLSEVKYRMAGEAARTICHVDEKAWDIEHAKKVSQQVSKVLYKQNWEENKDKYLLPPDAP
ELVNAIKNTAMFSKKLYTEDWEGDKTLFYPYNDSPELRRVAQAQKALSDIVYKKGHDERKSKYTSLPDPPDVEQAKKVTRQLSDIIYHDDYKN
KIKGKWSQTPCYDVVIAKMNAENLSMKKYQEDFENVKDQIYFMQTETPEYEANKRVSDNVSKIKYRADYEKNKAIADYNVLPATENPLLRQLK
TAGDVLSDKLYKEAYERSKGTSMNYCETPKFQTDNALKNFSDVKYKDAYQKNILGHYLGSFEDPHQIHCMKVEAMKSDKNYKADYEEEKTKCY
FPQTITQEYEAIKKLEQCKDHTYKKHPDQIKFTPVTDSPVQKQAEINSKQLSDKLYRSSGEEVKHKYTLPPDVPQFIQARYNAANVSDAYYKQ
DYHDLIAKGNNVSLDAIPITRAKASRNIASDYKYKEAYEKAKGQQVGFKSLQDDPKLVHYMHVAKIQSDREYKKDYEKSKTNYHTPPDTFSIQ
AAKKSQDVASTAHYKNLIHHYTYLPDAMDVELAKNMMQIQSDNVYKQDYNSWFKGIGWSPLGSLDVEKAKKAGDALNEKKYRQHPDTIKFTSV
PDSMTMVLAQHNTKQLSDVAYKQEGEKVKHKYKLDPDVPQFIQARVNAFNLSDANYKADWKKTIAKGYDLKPDAIPIIAAKASRNIASDYKYK
ESYEKDKGRQVGYRSLQDDPKLVHYMHVAKMQSDREYKKDYEVTKTKYHTPLDMFSVTAAKKAQEAVTNTGYKQLIHHYTLLPDSVNLELSRN
MMQLQSDNMYKADFNNWLRGVGWLPIQSLEVEKAKKASEILSEKKYRQHPDKLKYSIPLDAMEQVLAKQNAKTMNKRLYTDKWNKEKTSIHVM
PDTPEILQSRVNQITMSNKLYKAGWEEDKKKGYDMRPDAIPIKAAKTSQDIASDYKYKLAHEKAKGKHIGFRSLEDDPKLVHFMQVAKMQSDR
EYKKDYEKAKTNFHTPVDMLSVVAAKKAQEVATNANYKNLIHVYNVLPDAMSLELAKNMMQIQSNNQYRAEYDESMKGVGWMPLGSLEAEKNK
KAMEILSEKKYRQHPDKLKYSVPVDSMNMALALHNAKIMDEHQYKQAWEEDKKKVHMTPDIPQFALAKANAFNISDKMYRHSFEEARKKGYDL
RSDAIPIKAAKASRDIASDYKYKLGYEQDKGKLVGFRSLQDDPKLVHYMQVAKMQSDREYKKAYETSKTHYQTPSDALSIMAAKEAQDRVTNA
NYKRLIHHYMLLPDAMSFELYRNMNQIQSNNEYKQDYNEWFKGIGWSPAGSLDVEKSKKATEIASDQKYRQHPSIFPFTKQIDAMDMVLAKEN
ADIMNKHAYTQAWEKDKTQVHVMPDTPDILQAKQNKANYSQKQYKLDWQEMIKKGYDLTPEAISVKAAKASRDIASDYKYKEGYRKQQGHHIG
FRSLQDDPKMMWSMQVAKMQSEREYKKDFEKWKTKFNMPVDMLGFLLAKKCQELVSDIDYKHMLHRWTCLPDQNDVTQAKRVYELQSDNLYKS
DLQWLRGIGWSPLGSLESEKNKKASEILSEKKYRQHPDTIKFTSIPDAMNIILAKSNAKNRSDILYREAWDKDKTQVHIMPDTPEILLAKSNL
INTSDKHYKLGYEELRRKGYDLPPDAIPLKSAKASRDIASEYQYKTAYRKQLGHHVGARNIEDDPKMMWSMHVAKIQSDREYKKAFEKTKTHF
SSPVDMLGIVLAKKCQELVSDVDYKHLLHRWTCLPDQNDVVQARKVYDLQSDNVYKSDLQWLRGIGWSPLGSLDEEKNKRASMILSDKKYRQH
PDTIKFTSLPDSMPMVLAKHNSEIMNHRSYIAAWEKDKTSIHIMPDTPGILLAQQNKVNYSEKMYRLAMEEDKKKGYDLRADAIPIKAAKASR
DIASDYKYKEGYRKQLGHHIGARNIEDDPKMMWSMHVAKVQSDREYKKAFEKTKTHFSSPVDMLGIVLAKKCQELVSDVDYKHLLHRWTCLPD
QNDVVQARKVYDLQSDNVYKSDLQWLRGIGWSPLGSLDEEKNKRASMILSDKKYRQHPDTIKFTSLPDSMPMVLAKHNSEIMNHRSYIAAWEK
DKTSIHIMPDTPGILLAQQNKVNYSEKMYRLAMEEDKKKGYDLRADAIPIKAAKASRDIASDYKYKEGYRKQLGHHIGARNIEDDPKMMWSMH
VAKVQSDREYKKAFEKTKTHFSSPVDMLGIVLAKKCQELVSDVDYKHLLHRWTCLPDQNDVVQARKVYDLQSDNVYKSDLQWLRGIGWSPLGS
LDEEKNKRASMILSDKKYRQHPDTIKFTSLPDSMPMVLAKHNSEIMNHRSYIAAWEKDKTSIHIMPDTPGILLAQQNKVNYSEKMYRLAMEED
KKKGYDLRADAIPIKAAKASRDIASDYKYKEGYRKQLGHHIGARNIEDDPKMMWSMHVAKVQSDREYKKAFEKTKTHFSSPVDMLGIVLAKKC
QELVSDVDYKHLLHRWTCLPDQNDVVQARKVYDLQSDNVYKSDLQWLRGIGWSPLGSLDEEKNKRASMILSDKKYRQHPDTIKFTSLPDSMPM
VLAKHNSEIMNHRSYIAAWEKDKTSIHIMPDTPGILLAQQNKVNYSEKMYRLAMEEDKKKGYDLRADAIPIKAAKASRDIASDYKYKEGYRKQ
LGHHIGARNIEDDPKMMWSMHVAKIQSDREYKKAFEKTKTHFSSPVDMLGIVLAKKCQELVSDVDYRHYLHQWICLPDQNDVIHARKAYDLQS
DNFYKSDLEWMRGIGWVPIGSLDVEKAKRAGQILSDKVYRQPPDTIKFTSVTDSLEMTLAKHNAETMNKRLYTEAWNKDKTTIHVMPDTPEIL
LAKQNQAHYSQKMYKLALEESKKKGHDLRFDAIPIQAAKASREIASDYKYKEGYRKQLGHHIGARNIEDDPKMMWSMHVAKIQSDREYKKAFE
KTKTHFSSPVDMLGIVLAKKCQELVSDVDYRHYLHQWICLPDQNDVIHARKAYDLQSDAVYKSDLEWLKGIGWVPIGSLDVEKAKKAGEILSD
RKYRQPADQIKFTSVTDSLAMMLAKENAEIMNKRLYTEAWDADKTSIHVMPDTPTILLAKANAANVSHKHYVQAWEDAKKKGYDMRADAIPIR
SAKASRDIASDYKYKEAHEKQKGHYIGCRTAKEDPKLSWAARAMLLQNDRIYRKAYNDSKAHIHMPVDAMSLQAAKECQTLVSDVDYRHYLHQ
WTCLPDQNDVMHARKAYDLQSDNVYKSDLEWLRGIGWLTEGSVDVIKAKKAQEILSDRLYRTQPDKMKFTSITDTPDVVQAKINAMQLSNHLY
REVWDKDKTQISIPSDTPELLQSKLNALNISNKHYQKAWDEAKAKNYDLRADAIPIKHAKASRDIASEYKYKEAHEKQKGHYIGCRTAKEDPK
LSWAARAMLLQNDRIYRKAYNDSKAHIHMPVDAMSLQAAKECQTLVSDVDYRHYLHQWTCLPDQNDVMHARKAYDLQSDNVYKSDLEWLRGIG
WLTEGSVDVVKAKKAQEILSDRLYRTQPDKMKFTSVTDAPDVVQAKINAMQLSNRLYREAWDKDKTQISIPSDTPEMLQSKVNALNISNKHYQ
KAWDEAKAKNYDLRADAIPIKHAKASRDIASEYKYKEAHEKQKGHYIGCRTAKEDPKLSWAARAMLLQNDRIYRKAYNDSKAHIHMPVDAMSL
QAAKECQTLVSDVDYRHYLHQWTCLPDHNDVVHARKAYDLQSDAVYKSDLEWLRGIGWLPNDSPGVQRVKHAQDLLSDKVYRTPIDSVKYTSV
VDSPDILLAKMNAEQLSIPKYKEAWEKDKTMIHIMPDTPEITLARSNAHNYSQKLYKEAWDEVKMSYDLRADAIPIKAAKASREIASDYKYKL
DHEKQKGHYVGVPNAKADTKIRFALGIGKVQSELEYKKHFAKWKTQCHLPVDMLSIQSAKHGQSLVSDVDYRHYLHQWICLPDQNDVIHARKA
YDLQSDAVYKSDLEWLRGIGWLPNDSLGINHVKHAGDLLNERKYRTKAETLHFTPVADRVDYVTAKKSGEILSDIKYHKDWNEVKSNYTLTDT
PQLDMAREAARILNQSLYKESWEKEKATGYLLPPDTVQIRHAKHSNDVQSELKYKADYVKQRGHYVGVASMRDDPKLVWFEHAGEIQNDRLYK
SNYHKTKSKIHIPADIMSVVAAKECQALVSDVDYRHYLHQWTCHPDQNDCIQARKAYDLQSDNIYKSDLEWLRGCGWIPLGSVEHKKVKHAQE
LINKRAYTKDAIENFSKYTSVVDTPDIVLAKINSVNQSDLKYKETFNLEKGQYIGSDDTPELNHARDMSLLYSDKLYKRDWEVCKPIGYTLDA
KYIPLVGAKHANYVNSELKYKEIYEKLKGHYLAGKDIGDFPSVVHSLAFQKIRSALAYRKNYEDTKTRVHIPSDMMNHVLAKKCQYILSDLEY
RTYLHHWNCSPEEHDVIQARRAQEILSDVVYKDDLNWLKGIGCYVWDTPQILHAKKSYDLQSQIKYTAAGKENFQNFGVVTDTPVYVTAVQSG
INASDVKYKEDYHKTKDKYTTVTETADSERVQNLKHLFSNNLYKEAWDRVKATSYIMPSDAVSLARAKELKHNASIVKYREEYDKFKALYTLP
RSVEDDPNTARCLRVGKLNIDRLYKETYEKNKAKVHIIPDMVDIIAAKDAQKKISEIDYRTHLHDWICLPDLQINAHVRKVADQISDVVYKDD
LNWLKGIGCFVWDTPEILHAKHAYDLRSDIKYKSDADKMKSKYTVVMDTPVYVQNILSGLNASEVIYRGDYLKKVRGKMIPTDKTVDLQRAHH
ANKIQSENLYRWAGLKALPTGYSLPKDTPGFQHAKHVQHIGSDLKYKEAYEHMKAKGYTLGPNDVGFENVKKVNQVINERLYRATYHKNKDKI
HTTPDTPEIRQVRATQEAVSDLIYKSDFFKLQGHLISLPFTPQVLHCRYVGDITSDNKYKEDLKWLQGLGCFLYDTPDMVRARQLRKLWSNYV
YTDSAKKMRDKYSVVLDTPGYRTVQELKTHLSDLVYRAAGKELKTKYTSVLNTPDFLRAKEGQRIQSQYLYVALATKERPHHHAGNQTPAFTH
ARHVKDMVSETKYKIQYEKMKDKYTPVLDTPILIRAKRAYLNASDLRYKETFENTKGKYHTVKDALDIVYHRKVTDDISSVKYKENYMSQLGI
WRSIPDRPEHFHHRAVTDAISDVKYKEDLSWLRGIGCYAWDTPDFALAEKNKVLYSGHKYKETFEKTKSHFKYVADSPINRHFKHATQLLDAN
SYKSLAKMLLKQGCNEILRPDILTALYNSYLWSQVEYKKDYEKKKDKYTTVVDTPENIRTAKVNKQISDIIYKLEYNKAKPKGYTTIHDTPML
LHVRKVKDRISDLKYKELYERNKSHCNVVADSVHIKTPRHAYKLNSNLDYKKKYEAAKAHWHWIADRPDFVQAAKSSLQQSDYEYKLDREYLK
GCKLSVTDDKNTVLALNNAILASDIKYKEKHNKARGTCLVVPDTPQILLAKNVSSLVSENKYKEHSKKQLPRGSYTTLPETRDTAHVKEVTKN
VSDTNYKKKFVKEKGKSNYSIMLEPPEVKHAMEVAKKQSTVEYKKDAKSKLHYTPIADRPDIKKATQAAKLISDIEYKKRGEAGLGVTMLGRP
DIELAKEVSKLTSQAEYLKRHMRGHGAASYDTPWMRTFKKANMLSSHVKYKENFSKEKGKKPKYDLKEAKIYKTMKDAHNIASEVKYKADLKK
LHKPVTDMSESLIMNHVLNTSQLASAYQYKKQYEKSKGHYHMVPDNLEQVHLREASELQSHVKYKEKYEKEKGKPMLDFETPTYLTAKESQLM
QSEKEYKRDFEESIKGRNLTGLEITPSLLHVKYATKIASEKEYRKDLEEGVKGKGLSVLEETPDMLRAKNATQILNEKEYKKALELEIKGKGL
SELALETPDFVRAKNATDIASQIKYKQLAEMEKANYTSVVDTPEIIHAQQVKNLSSQKKYKEEAEKTMPYYVPVADTPEMQRVRENQKNFSTL
QYQWDLQNSKGKVTVVQDTPEMLRVKENQKNFSSILYKEDIGTGTTIEKTPEMQRVKRTQDAISSIKYKESIGKGTPIPDLPEVKRVKETQKH
ISSVLYKEDLGTGIPTPVTPEIERVKRNQEHISSVLYKEELGTGTPIPVTPEVERVKRNQEHISSVLYKESVGTGTPTPITPEMERVKRNQEI
CSSVLYKENIGKATPTPVTPEMERVKRNQEIISSVLYKENVGKVTPTPITPEMERVKRNQEIISSVLYKESLGRATPTPITPEMERVKRNQEQ
ISSVVYKEGLGKATPTPVTPEMERVRRNQEQISSVLYKEHLAKGTPTPMTPEMERAKRNQENISSVLYSDSFRKQVQGKAAYVLDTPEMRRVR
ETQKHISTVKYHEDFEKNKGTFTPVVTDPITERVKKNMHDFSDISYRGIQRRVVEMEQKRVDQDQENLTGLRVWRTNPGSVFDYDPAEDNIQS
RSLHMISVQAQRRSREHSRSASALSISGGDEKSEPSEGVNQHLSYYSSGGFFTTTATVGYKHAKTIELPQQRSASVATQQTTVSSVPSHPSTA
GKTYRAMYDYTAADADEVSFKDGDTIVNVQAIDEGWMYGTVQRTGKTGMLPANYVEAV (SEQ ID NO: 65)
>tr|F1MQI3|F1MQI3_BOVIN Nebulin OS = Bos taurus OX = 9913 GN = NEB PE = 4 SV = 2
MADDEEYEEVVEYYTEETVYEEVPGETRTRFYETTTTRTSDYEQSETSRPALAQPVPEKPVERKRVIRKKVDPSKFMTPYIAHSQKMQNLFST
NKYKENYEKAKGKPYAITTDTPELRRIKKVQDQLSEVKYRVDGDVAKTICHVDEKAKDIEHAKKVSQQVSKVLYKQNWEDTKDKYLLPPDAPE
LVQAIKNTAMFSKKLYTEDWEADKTMFYPYNDSPELRRVAQAQKALSDIAYKKGLAEQQTQFTSLPDPPDIEFAKKVTNQVSKQKYKEDYENK
VKGKWSETPCFEIATARMNSNNISTKKYQEDFEHMKDQIYFMQTETPEYKVNKQAGVAASKVKYKQDYEKNKGKADYNVLPASENPLLRQLKA
AGDALSDKLYKENYEKTKAKSINYCETPKFKLDTVLENFSSDTKYKDSYLKDILGHYVGSYEDPYHTHCMRVSAQNSDKNYKAEYEEDRGKGF
FPQTITQEYEAIKKLDQCKDHTYKVHPDKTKFTQVTDSPVLMQAQVNSKQLSDLNYKAKHENEKEKCHIPPDTPAFIQHKLNAYNLSDNIYKH
DWEKTKAKKFDIKVDAIPLLAAKANTKIASDVMYKKDYEKSKGKMIGALSINDDPKMLHSLKTAKNQSDRLYKENYEKTKAKSMNYCETPKYQ
LDTLLKNFSEAKYKDSYVQNVLGHYIGSFEDPYQVHCLKISAQNSDKNYKAEYEEDKGKCYFPQTITQEYEAIKKLDQCKDHTYKVHPDKTKF
TAVTDTPVLLQAQLNTKQLSDLNYKAKHEGEKFKCHIPADAPQFIQHRVNAYNLSDNIYKHDWEKTKAKKFDIKVDAIPLLAAKANTKIASDV
MYKKDYEKSKGKMIGALSINDDPKMLHSLKTAKNQSDHEYRKDYEKSKTIYTAPLDMLPLTHAKKSQAIASDVDYKHLLHNYSYPPDSVNVDL
AKKAYALQSDVEYKADYNSWMKGCGWMPFGSLEMEKAKRASDILNEKKYRQHPDTLKFTSIEDAPIIVQSKINQAQRSDVAYKAKGEEVIHKY
SLPADLPQFIQAKVNAYNISENLYKADLKDLSKKGYDLRIDAIPIKAAKAARQAASDVQYKKDYEKAKGKMVGFQSLQDDPKLVHYMNVAKIQ
SDREYKKAYEKTKTRHNTPHDMVNIVAAKKAQDVASNVNYKHSLHHYTYLPDAMDLELSKNMMHIQSDNVYKEDYNNWMKGIGWIPIGSLEVE
KVKKAGDALNEKKYRQHPDTLKFTSIVDSPVMVQAKQNTQQVSDILYKAKGEDVKHKYTMSPDLPQFLQAKCNAYNLSDVCYKRDWHDLIAKG
TNVLGDAIPITAAKASRNIASDYKYKEAYEKAKGKQVGFRSLQDDPKLVHYMNVAKLQSDREYKKNYENTKTSYHTPGDMVSITAAKMAQDVA
TNVNYKQPIHHYTYLPDALSLEHIRNVNQIQSDNVYKDEYNHFFKGMGWIPIGSLEVEKVKKAGDALNEKKYRQHPDTIKFTSVPDSMGMVLA
QHNTKQLSDLNYKVEGEKVKHKYTMDPDVPQFIQAKVNAYNMSDSHYKADWKKTLAKGYDLRPDAIPIVAAKSSRNIASDFKYKEAYEKTKGK
QIGFRSLQDDPKLVHFMNVAKMQSDREYKKGYEASKTKYHTPLDMLSVTAAKKSQEVATNTNYKQPFHHYTLLPDALNVEHSRNAMQIQSDNL
YKSDFTNWMKGIGWLPLESLEVEKAKKAGEILSEKKYRQHPEKLKFTYAMDTMEQALNKSNKLIMDKRLYTEKWNKDKTTIHVMPDTPDILLS
RVNQITMSDKLYKAGWEEEKKKGYDLRPDAISIKAARASRDIASDYKYKQAYEQAKGKQIGFRSLEDDPKLVHFMQVAKMQSDREYKKAYEKS
KTSFQTPVDMLSVVAAKKSQEVATNANYRNVIHTYNMLPDAMSLELAKNMMQIQSDNQYKADYADFMKGIGWLPLGSLEAEKNKKAMEIISEK
KYRQHPDTLKYSTLMDSMNMVLAKNNAKIMNEHLYKQAWEADKTKVHIMPDIPQIILAKANAINISDKLYKLSLEEAKKKGYDLRTDAIPIKA
AKASRDIASDYKYKHSYEKERGKMVGFRSLEDDPKLVHSMQVAKMQSDREYKKNYEKTKTSYHTPADMLSVTAAKDAQANITNTNYKHLIHKY
ILLPDAMNIQLSKNMNRIQSDNEYKQDYNEWYKGLGWSPAGSLEVEKAKKATEYASDQKYRQHPSNFQFTKLNDSMDMVLAKQNAHTMNKYLY
TVDWNKDKTKIHVMPDTPDILQAKQNQTMYSQVKYKMGWPSGLERVVNLPSVLIKIFKSKQNKDLIWRFKYKQGYRKQIGHHIGFRSLQDDPK
LVLSMNVAKMQSEREYKKDFEKWKTKFSSPVDMLGVVLAKKCQALVSDVDYKNYLHGWTCLPDQNDVIHAKKAYDLQSENLYKSDLEWLKGIG
WSPLGSLEAEKNKRASEIISEKKYRQPPDRNKFTSIPDAMDIVLAKTNAKNRSDILYREAWDKDKTQIHIMPDTPDIILAKANLINTSDKFYR
MGYEELRKKGYDLPVDAIPIKAAKASREIASEYKYKEGFRMQLGHHIGARNIKDDPKMMWSMHVAKIQSDREYKKDFEKWKTKFSSPVDMLGV
VLAKKCQTLVSDIDYKNYLHQWTCLPDQSDVIHARRAYDLQSDNLYKSDLQWLRGIGWLPSGSLEDEKNKRASQILSDHVYRQHPDQFKFSSL
MDSIPMVLAKNNAITMNHRLYTEAWDKDKTTVHIMPDTPEVLLAKQNQINYSEKLYKLGLDEAKRKGYDMRIDAIPIRAAKASRDIASEFKYK
EGYRRQLGHHIGARAIHDDPKMMWSMHVAKIQSDREYKKDFEKWKTKFSSPVDMLGVVLAKKCQTLVSDIDYKNYLHQWTCLPDQSDVIHARQ
AYDLQSDNVYKSDLQWLRGIGWVPIGSLDVEKSKRASEILSDKLYRQPPDKFKFTSVTDSLEQVLAKNNAINMNKRLYTEAWDKDKTQVHIMP
DTPEITLARTNKVNYSENLYKLAHEEAKKKGYDLRSDAIPIIAAGLEKDHISDYKYKDGYRKQLGHHIGARDIKDDPKMMWSMHVAKIQSDRE
YKKDFEKWKTKFSSPVDMLGVVLAKKCQTLVSDIDYKNYLHQWTCLPDQSDVIHARQAYDLQSDNVYKSDLQWLRGIGWVPIGSVDVVKCKRA
AEILSDNLYRQPPDTLKFTSVPDSLEQVLAKNNAINMNKRLYTEAWDKDKTQIHIMPDTPEIMLARQNKLNYSETLYKLANEEAKKKGYDLRS
DAIPIVAAKASRDIISDYKYKDGYRKQLGHHIGARDIKDDPKMMWSMHVAKIQSDREYKKDFEKWKTKFSSPVDMLGVVLAKKCQTLVSDIDY
KNYLHQWTCLPDQSDVIHARRAYDLQSDNIYKSDLQWLRGIGWVPIGSVDVVKCKRAAEILSDNLYRQRPDTLKFTSVPDSLEQVLAKNNAIN
MNKRLYTEAWDKDKTQIHMMPDTPEITLARQNKINYSENLYRQAMEEAKKEGYDLRSDAIPIVAAKASREIASDYKYKEAYRKQLGHHIGARA
IHDDPKMMWSVHVAKMQSDREYKKDFEKYKTRESSPVDMLGIVLAKKCQTLVSDVDYKHPLHEWTCLPDQNDIIHARKAYDLQSDNLYKSDLE
WLKGIGWVPIGSVEVLKAKRAGEILSDNIYRQRPDTLKFTSVTDSPEQVLAKNNAINMNKRLYTEAWDNDKKTIHVMPDTPEIMLAKLNRINY
SDKLYKLALEESRKEGYDLRLDAIPIQAAKASREIASDYKYKEGYRKQLGHHIGARNIKDDPKMMWSIHAGKLQSDLEYKKDFEKWKTKFSSP
VDMMGLVQAKKCQILVSDIDYKNLLHEWTCLPDQNDIIQARKAYDLQSDAIYKADLEWLRGIGWVPIDSVGVEHAKRAGEILSERKYRQPAVQ
LKFTSITDTPEIVLAKNNALNVSKHLYTEAWDADKTSIHVMPDTPEILLAKSNSANISHKLYTKGWDESKMKDYDLRADAISIKSAKASRDIA
SDYKYKEAYEKHKGHHIGARSVEDDPRIMCAMNAGRIQSEREYKKEFQKWKTKFSSPVDMLGILLAKKCQTLVSDIDYRNYLHHWTCLPDQND
IIQARKAYDLQSDAIYKADLEWLRGIGWMPEGSPEVLRVKNAQHIERDSVYRTPVVKLKYTSIVDTPEVVLAKSNAENISIPKYREVWDKDKT
SIHIMPDTPEINLARTNALNVSNKLYREGWDEMKMSCDVRLDAIPIQAAKASREIASDYKYKLDHEKQKGHYVGTRTARDDNKIRWALIAGKI
QNEREYRLHWAKWKSKFQSPPDMLSIEHSKNSQTLVSDIDYRHYLHQWTCMPDQNDVIQARKAYDLQSDAIYKADLEWLRGIGWMPADSVSVN
HAKHMADIFNEKKYRTKIETLSETPVDDRVDYVTAKHSGEILNDIKYRKDWNDTKSKYTLTETPQLHTAQEAARILDQYLYKESWEKQKATGY
ILPPDAVPFVHAHHSGDVQSELKYKAEHVKQKGHYVGVPTMRDDPKLVWFEHAGQIQNDRLYKENYHKTKAKIHIPPDMVSVLAAKEGQALAS
DIDYRNYLHQWICHPDQNDVIQARKAYDLQSDNIYKADLEWLRGIGWIPLDSVDHVRVTRNQEMMNQIKYKKDALANYPNFTSVVDPPEIVLA
KINSVNQSDVKYKETFNKLIKGKYIFSPDTPYITHSKDMEKLYSTILYKRAWDGTKAYGYTLDERYIPIVGAKHADEVNSELKYKETYEKLKG
HYLAGKEISEFPNVVHCLDFQKMRSLLNYRRHYEDTKANVHIPQDMMNHVLAKRCQYILSDLEYRHYFHQWTSLPEEPNVVRVRHAQEILSDN
VYKDDLNWLKGIGCYVWDTPQILHAKKSYDLQSQILYTAAGKENLKNYNLVTDTPLYVTALQSGINASEVKYKENYHQTKDKYTTVLETVDYD
RIKNLKDLFSSNLYKEAWDKVKATSYILPPNTVSLTHAKNQKYMASHIKYREEYEKFKALYTLPRSVEDDPNTARCLRVGKFNIDRLYRSVYE
KNKMKIHIVPDMVEMVTAKDSQKKVSEIDYRLHLHEWICHPDLQVNSHVRKVTDQISDIVYKDDLTWLKGIGCYVWDTPEILHAKHAYDLRND
IKYKAHVLKTRNNYKLVTDTPVYVQAVKSGKQLSDAVYHYDYVHSIRGRVAPTTKTVDLDRALHAYKLQSENLYRKAGLHALPTGYRLPVDTP
HEKHTKDTRYMSSYFKYKEVYEHMKAYGYTLGPNDVPFVNVRRVNNITSERLYRQLYHKLKDKIHTTPDTPEIRQVKKTQEAVSELIYKSDFF
KMQGHMISLPYTPQVLHCRYVGDITSDIKYKEDLQVLRGMGCFLYDTPDMVRSRHLRKLWSHYLYTDKARKMRDKYKVVLDTPEYRKVQELKT
HLSELVYRAAGRKQKSIFTSVPDTPDLTRAKRGQKLQSQYLYVELATKERPHHHAGNQTTALKHARHVKDMVSENKYKIQYEKMKDKYTPVPD
TPILIRAKRAYWNASDLRYKETFQKTKGKYHTVKDALDIVYHRTVTDHISKIKYKENYMSQLGIWRSIPDRPEHFHHRAVTDAVSDVKYKQDL
TWLKGIGCYAYDTPDFTLAEKNKTLYSKYKYKEVFERTKSNFKYVADCPINRHFKFATQLMNEKKYRADYEQRKDKYHLVVDEPRHLLAKIAG
DQISQIKYRKNYEETKDKFTSIVDTPEHLRTTKVNKQISDILYKLEYNKAKPRGYTTIHDTPMLLHVRKVKDEVSDLKYKEVYQRTKSNCTIE
PDAVHIKAAKDAYKVNTNLDYKKKYEATKAYWKWTPDRPDFIQAAKSTLQQSDFEYKLDREYLKGCKLSVTDDKDMVLALKNSIIESDLKYKE
KHVKERGSCHAVPDTPQILLAKTVSSLVSENKYKSYVKKHLAQGSYTTLPETRDTIHVKEVTKNVSDTNYKKKFVKEKGKSNYSIMLEPPDVK
HAMDVAKKQSNVAYKKDAKENLHYTTVADRPDIKKATQAAKQASEVEYRAKHRKEGSHGLSMLGRPDIEMAKKAAKLSSQVQYRENFNKEKGK
TPKYNPKDSQLYKVMKDANTLASEVKYKADLKKLHKPVTDMKESLIMNHVLNTSHLASSYQYKKNYEKSKGHYHTIPDNLEQLHLKEATELQS
IVKYKEKYEKERGKPMLDFETPTYITAKESQQMQSGKEYRKDYEESIKGRNLTGLEVTPALLHVKYATKIASEKEYRKDLEESIRGKGLSEME
DTPDMLRAKNATQILNEKEYKRDLELEVKGRGLNAMANETPDFLRARNATDIASQIKYKQSAEMEKANFTSVVDTPEIIHAQQVKNLSSQKKY
KEDAEKCMSYYETVLDTPEMQRVRENQKNFSLLQYQYDLKNSKGKITVVQDTPEILRVKENQKNFSSVLYKEDVSPGTAIGKTPEMMRVKQTQ
DHISSVKYKEVIGQGTPIPDLPEVKRVKQTQKHISSVMYKENLGTGIPTPVTPEIERVKRNQENFSSVLYKENLGKGTPTPITPEMERVKRNQ
ENFSSILYKENLSKGTPLPVTPEMERVKRNQENFSSVLYKENVGKGTPTPVTPEMQRVKRNQENISSVLYKENLGKATPTPFTPEMERVKRNQ
ENESSVLYKENMRKATPTPVTPEMERAKRNQENISSVLYSDSFRKQIQGKAAYVLDTPEMRRVRETQRHISTVKYHEDFEKHKGCFTPVVTDP
ITERVKKNTQDFSDICYRGIQRKVVEMEQKRNDQDQETITGLRVWRTNPGSVFDYDPAEDNIQSRSLHMINAQAQRRSREQSRSASGLSISGG
EEKSEHSEAAHLSTYSDGGVFFSAASTGYKHARTTELPQQRSSSVATQQTTVSSIPSHPSTAGKIFRAMYDYMAADADEVSFKDGDAIVNVQA
IDEGWMYGTVQRTGRTGMLPANYVEAI (SEQ ID NO: 66)
>tr|F1MPU4|F1MPU4_BOVIN Myotilin OS = Bos taurus OX = 9913 GN = MYOT PE = 4 SV = 1
MFNYERPKHFIQSQNPCGSRLQPPGPEISSYSSQTKQSSITIQPRQCTEQRYSASSTVSSHITMSSSAFPASPQQLAGSNPAQRVTATYNQSP
ASFLSSILPSQPDYSSSKNPSTVDSNYQQPSVGQPINVKSSQNANAKLTPKTPDHEIQGSKEALIQDLERKLKCKDSLLHNGNQRLTYEEKMA
RRLLGPQNAAAVFQGQNDSEAQDSAQQHNIEHARLQVPTSQVRSRSSSRGDVNDQDAIQEKFYPPRFIQVPENMSIEEGRFCRMDFKVSGLPA
PDVSWYLNGRPVQSDDFHKMIVSEKGFHSLIFEVVRASDAGAYACVAKNRAGEATFTVQLDVLAKEHRRAPMFIYKPQSKKVFEGESVKLECQ
ISAVPPPKLFWKRNNEMVQFNTDRISLYHDNSGRVTLLIKDVNKKDAGWYTVSAVNEAGVTTCNTRLDVTARPNQTLPAPKQLRVRPTFSKYL
ALNGKGLNVKQAFNPEGEFQRLAAQSGLYESEEL (SEQ ID NO: 67)
>tr|A0A1D5NT92|A0A1D5NT92_CHICK Myotilin OS = Gallus gallus OX = 9031 GN = MYOT PE = 4 SV = 1
MSVRNLPSVSSMCQPTMFNYERPKHFIQSKNVCQGQQQPPGSSTSTESSRQIKQSSILIQPRNPSGQKFSSSSSLSSSITLSSPSCSAPKEST
YPVTPASAQSPASSSSGQRLISMPNQTPAAFLCSVLPSQPDYNSQTPPMEPHYSKPMYKKQASINSMQKTSDQEIRGTKEALIQDLEKKLRCK
DNLLQNGNQRLTYEERMARRLLGPENAASVLEAQSEDMQNTQNAENVRLQVPTTHVRSRPSSRGDERGHDSIQEKFFQPRFTQVPEDVIIEEG
RFCRLDFKVSGLPTPDVMWYQNGRMVHQDQFHKMIVSEKGFHSFIFEAVKSSDAGTYECVAVNRAGESSFAVKVEVIAKEHHTPPTFIFKPQS
KKVFEGDTARLECQISAIPTPRIYWKRNNEMVQYNTDRISLLHDNTGRICLLIHNANKKDAGWYTVSAVNGAGVATCHARLEVATHTNKPVPA
PKQLRVRPTFSKYLALNGRGLDVKQAFSPEGEFQRLAEQSGLYESDEL (SEQ ID NO: 68)
>tr|F1RH92|F1RH92_PIG Myotilin OS = Sus scrofa OX = 9823 GN = MYOT PE = 4 SV = 1
MFNYERPKHFIQSQNPCGSRLQPPGPETSSYSSQTKQSSIIIQPRQCTEQRFSASSTVSSHITMSSSAFPASPQQPAASNPGQRVTATYNQSP
ASFLSSILPSQPDYSSSKIPSTMDSNYQQPSVGQPVNAKPSQSLNAKPIPRTPDHEIQGSKEALIQDLERKLKCKDSLLHNGNQRLTYEEKMA
RRLLGPQNAAAVFQAQNDSAAQDSPQQHNSEHARLQVPTSQVRSRSSSRGDVNDQDAIQEKFYPPRFIQVPENMSVEEGRFCRMDFKVSGLPA
PDVSWYLNGRPVQSDDLHKMIVSEKGFHSLIFEVVRASDAGAYACVAKNRAGEATFTVQLDVLAKEHRRAPMFIYKPQSKKVFEGDSVKLECQ
ISAIPPPKLFWKRNNEMVQFNTDRISLYHDNSGRVTLLIKDVNKKDAGWYTVSAVNEAGVITCNTRLDVTARPNQTLPAPKQLRVRPTFSKYL
ALNGRGLDVKQAFNPEGEFQRLAAQSGLYESEEL (SEQ ID NO: 69)
>XP_013837221.1 twinfilin-2 [Sus scrofa]
MAHQTGIHATEELKEFFAKARAGSVRLIKVVIEDEQLVLGASRELMGCWDQDYDRAVLPLLDAQQPCYLLYRLDTQNAQGFEWLFLAWSPDNS
PVRLKMLYAATRATVKKEFGGGHIKDELFGTVKDDLSFAGYQKHLSSCAAPAPLTSAERELQQIRINEVKTEISVESKHQTLQGLAFPLQPQA
QRALQQLRQKMINYIQLKLDLERETIELVHTEPTDVAQLPSRVPRDAARYHFFLYKHTHEGDPLESVVFIYSMPGYKCSIKERMLYSSCKSRL
LDSVEQDFQLEIAKKIEIGDGAELTAEFLYDEVHPKQHAFKQAFAKPKGPGGKRGHKRLIRGPGENGDDS (SEQ ID NO: 70)
>XP_024844129.1 dystrophin isoform X4 [Bos taurus]
MLWWEEVEDCYEREDVQKKTFTKWINAQFSKFGKQHIENLFSDLQDGRRLLDLLEGLTGQKLPKEKGSTRVHALNNVNKALQVLQKNNVDLVN
IGSSDIVDGNHKLTLGLIWNIILHWQVKNVMKNIMAGLQQTNSEKILLSWVRQSTRNYPQVNVINFTTSWSDGLALNALIHSHRPDLFDWNSV
VRQQSATQRLEHAFNIAKYQLGIEKLLDPEDVATTYPDKKSILMYVTSLFQVLPQQVSLEAIQEVEMLPRPSKVTREEHFQLHHQMHYSQQIT
VSLAQGYERTPSSPQPRFKSYAYTQAAYVSTSDPTRSPFPSQRLEAPEDKSFGSPLMETEVNLDSYQTALEEVLSWLLSAEDTLQAQGEISND
VEEVKEQFHTHEGYMMDLTSHQGRVGNVLQLGSQLIGSGKLSEDEETEVQEQMNLLNSRWECLRVASMEKQSNLHKVLMDLQNQQLKELNAWL
TKTEERTRKMEKEPLGPDLEDLKRQIQQHKVLQEDLEQEQVRVNSLTHMVVVVDESSGDHATAALEEQLKVLGDRWANICRWTEDRWVLLQDV
LLKWQRFTEEQCLFSTWLSDKEDALNKIPTSGFKDQSEMLSSLQKLAVLKTDLEKKKQTMDKLCSLNHDLLSTLKNTLVAQKMEAWLDNFAQR
WDNLVQKLEKSSTQISQAVTTTQPSLTQTTVMETVTMVTTREQILVKHAQEELPPPPPQKKRQIIVDSEIKKRLDVDITELHSWITRSEAVLQ
SPEFAVYRKEGNFSDLKEKVNAIEREKAEKFRKLQDASRSAQALVEQMVNEGVNADSIKQASEQLNSRWIEFCQLLSERLNWLEYQNNIITFY
NQLQQLEQMTTTAENWLKTQPTTPSEPTAVKSQLKNCKDEVNRLSALQPQIERLKIQSIALKEKGQGPMFLDADFVAFTNHFNQVFADMQARE
KELQTILDTLPTVRYQETMSTILTWIQQSETKLSIPQVTVTEYEIMEQRLEELQALQSSLQEHQNDLNYLSTTVKEMSRKAPSHISQRYQSEF
ENIEGRWKKLSAQLNERCQKLEEQMAKLRKLQNHIKTLKKWMAEVDVFLKDEWPALGDSEILKKQLKQCRLLVSDIQTIQPSLNSVNEGGQKI
KTEAEPEFASRLETELRELNTQWDYICRQVYARKEALKGGLDKTVSLQKDLSEMHEWMTQAEEEYLERDFEYKTPDELQTAVEEMKRAKEEAQ
QKEAKVQLLTESVNSVIAQAPPAAQEALRKELDTLTTNYQWLCTRLNGKCKTLEEVWACWHELLSYLEKANKWLNEVELKLKTTENIPGGAEE
ISEVLSSLENLMQHSEDNPNQIRILAQTLTDGGVMDELINEELETFNSRWRELHEEAVRRQKLLEQSIQSAQEIEKSLQLIQESLSSIDKQLA
AYIADKVDAAQMPQEAQKIQSDLTSHEISLEEMKKHYQGKETAQRVLSQIEVAQKKMQDVSMKFRLFQKPANFEQRLQESKMILDEVKMHLPA
LETKSVEQEVVQSQLNHCVNLYKSLSEVKSEVEMVIKTGRQIVQKKQTENPKELDERVTALKLHYNELGAKVTERKQQLEKCLKLSRKMRKEM
NALTEWLAATDLELTKRSAVEGMPSNLDSEVAWGKATQKETEKQKVHLKSITELGEALKTVLGKKETLVEDKLSLLNSNWIAVTSRAEEWLNL
LLEYQKHMETFDQNVDHITKWIIQADALLDESEKKKPQQKEDMLKRLKAELNDIRPKVDSTRDQAANLMANRGDHCRKVIEPKISELNHRFAA
ISHRIKTGKASIPLKELEQFNSDIQKLLEPLEAEIQQGVNLKEEDFNKDMSEDNEGTVKELLQRGDNLQQRITDERKREEIKIKQQLLQTKHN
ALKDLRSQRRKKALEISHQWYQYKRQADDLLKCLDDIEKKLASLPEPRDERKIKEIDRELQKKKEELNAVHRQAEGLSEDGAAMAVESTQIQL
SKRWREIESKFAQFRRLNFAQIHTVHEESVMVMTEDMPLEISYVPSTYLTEITHVLQALSEVEQLLNAPDLCAKDFQDLFKQEESLKNIKDNL
QQISGRIDVIHNKKAAALQSTTPPEKARLQEALSRLDFQWERVNKMYKDRQGQFDRSVEKWRRFHYDMKIFNQWLTEAEHFLKKTQIPENWEH
AKYKWYLKELQDGIGQRQTVVRVLNATGEEIIQQSSKIDASILQEKLGSLNLRWQEVCKQLAERKKRLEEQKNILSEFQRDLNEFVLWLEEAG
NISSIPLEPGNEQQLKEKLEEVKLLAEELPLRQGILKQLNETGGTVLVSAPISPEEQDKLENKLKQTNLQWIKVSRSLPEKQGEIEAHIKDLG
QLEEQLNHLLLWLSPIRSQLEIYNQPNQTGPFDIKETEVAVQAKQPDVEGILSKGQNLYKEKPATEPVKRKLEDLSSEWKAVTHLLQELRAKW
PGPVPGLTATGAPPSQTVALVTQPVVAKETAVSKLEMPSSLLLEVPALADFNRAWTELTDWLSLLDRVLKAQRVMVGDLEDINEMIIKQKATL
QDLEQRRPQLEELITAAQNLKNKTSNQEARTIITDRIERIQSQWDEVQEHLQNRRQQLNEMLKDSTQWLEAKEEAEQVVGQARAKLETWKEGP
YTMDAIQRKITETKQLAKDLRQWQINVDVANDLALKLLRDYSADDTRKVHMITENINASWASIHKRVSERETALEETHRLLQQFPLDLEKFLA
WLTEAETTANVLQDATHKERLLEDSKGVRELMKQWQDLQGEIEAHTDIYHNLDENGQKILRSLEGSDDAVLLQRRLDNMNFKWSELRKKSLNI
RSHLEASSDQWKRLHLSLQELLVWLQLKDDELSRQAPIGGDFPAVQKQNDIHRAFKRELKTKEPVIMSTLETVRIFLTEQPLEGLEKLYQEPR
ELPPEEKAQNVTRLLRKQAEEVNTEWEKLNLHSADWQRKIDEALERLQELQEATDELDLKLRQAEVIKGSWQPVGDLLIDSLQDHLEKVKALR
GEIAPLKENVSHVSDLARQLTTLGIQLSPYNLSTLEDLNTRWKLLQVAVEDRIRQLHEAHRDFGPASQHFLSTSVQGPWERAISPNKVPYYIN
HETQTTCWDHPKMTELYQSLADLNNVRFSAYRTAMKLRRLQKALCLDLLSLSAACDALDQHNLKQNDQPMDILQIINCLTTIYDRLEQEHNNL
VNVPLCVDMCLNWLLNVYDTGRTGRIRVLSFKTGIISLCKAHLEDKYRYLFKQVASSTGFCDQRRLGLLLHDSIQIPRQLGEVASFGGSNIEP
SVRSCFQFANNKPEIEAALFLDWMRLEPQSMVWLPVLHRVAAAETAKHQAKCNICKECPIIGFRYRSLKHFNYDICQSCFFSGRVAKGHKMHY
PMVEYCTPTTSGEDVRDFAKVLKNKFRTKRYFAKHPRMGYLPVQTVLEGDNMETPVTLINFWPVDSAPASSPQLSHDDTHSRIEHYASRLAEM
ENSSGSYLNDSISPNESIDDEHLLIQHYCQSLNQDSPLSQPRSPAQILISLESEERGELERILADLEEENRNLQAEYDRLKEQHEHKGLSPLP
SPPEMMPTSPQSPRDAELIAEAKLLRQHKGRLEARMQILEDHNKQLESQLHRLRQLLEQPQAEAKVNGTTVSSPSTSLQRSDSSQPMLLRVVG
SQTSESMGEEDLLSPPQDSSTGLEEVMEQLNNSFPSSRGRNTPGKPMREDTM (SEQ ID NO: 71)
>tr|Q05JF3|Q05JF3_BOVIN Calsequestrin OS = Bos taurus OX = 9913 GN = CASQ1 PE = 1 SV = 1
MSAADRMGARAVPGLRLALLLLMVLGTPKSGVQGEEGLDFPEYDGVDRVVNVNAKNYKNVFKKYEVLALLYHEPPEDDKASQRQFEMDELILE
LAAQVLEDKGVGFGMVDSEKDAAVAKKLGLTEEDSVYVFKGDEVIEYDGEFSADTLVEFLLDVLEDPVELIEGERELQAFENIEDDNKLIGYF
KNKDSEHYKAYEDAAEEFHPYIPFFATFDSKVAKKLTLKLNEIDFYEAFMEEPVTIPDKPNSEEEIVSFVEAHKRSTLRKLKPESMYETWEDD
LDGIHIVAFAEETDPDGYEFLETLKAVAQDNTDNPDLSIIWIDPDDEPLLVPYWEKTFNIDLSAPQIGVVNVTDADSVWMEMDDEEDLPSAEE
LEDWLEDVLEGEINTEDDDEEDD (SEQ ID NO: 72)
Cardiac muscle tissue
>sp|P68034|ACTC_CHICK Actin, alpha cardiac muscle 1 OS = Gallus gallus OX = 9031 GN = ACTC1
PE = 3 SV = 1
MCDDEETTALVCDNGSGLVKAGFAGDDAPRAVFPSIVGRPRHQGVMVGMGQKDSYVGDEAQSKRGILTLKYPIEHGIITNWDDMEKIWHHTFY
NELRVAPEEHPTLLTEAPLNPKANREKMTQIMFETFNVPAMYVAIQAVLSLYASGRTTGIVLDSGDGVTHNVPIYEGYALPHAIMRLDLAGRD
LTDYLMKILTERGYSFVTTAEREIVRDIKEKLCYVALDFENEMATAASSSSLEKSYELPDGQVITIGNERFRCPETLFQPSFIGMESAGIHET
TYNSIMKCDIDIRKDLYANNVLSGGTTMYPGIADRMQKEITALAPSTMKIKIIAPPERKYSVWIGGSILASLSTFQQMWISKQEYDEAGPSIV
HRKCF (SEQ ID NO: 73)
>NP_990097.1 myosin heavy chain, cardiac muscle isoform [Gallus gallus]
MMDMTEFGEAAPFLRKSEKELMMLQTVAFDGKKKCWVPDDKKAYVEAEITESSGGKVTVETTDGRTMTIKEDDVQSMNPPKFDMIEDMAMLTH
LNEASVLYNLRKRYSNWMIYTYSGLFCVTINPYKWLPVYKSEVVAAYKGKRRSEAPPHIFSIADNAYHDMLRNRENQSMLITGESGAGKTVNT
KRVIQYFATVAALGEPGKKSQPATKTGGTLEDQIIQANPALEAFGNAKTLRNDNSSRFGKFIRIHFGTTGKLSSADIEIYLLEKSRVIFQQPG
ERDYHIFYQILSGKKPELLDMLLVSTNPYDYHFCSQGVVTVDNLDDGEELMATDQAMDILGFVPDEKYGAYKLTGAIMHFGNMKFKQRPREEQ
AEADGTESADKAAYLMGINSSDLVKGLLHPRVKVGNEYVTKGQSVEQVLYAVGALSKAVYDRMFKWLVVRINKTLDTKLPRQFFIGVLDIAGF
EIFDFNSFEQLCINYTNEKLQQFFNHHMFVLEQEEYKKEGIEWVFIDEGMDLQACIDLIEKPLGILSILEEECMFPKATDMTFKAKLYDNHLG
KSPNLQKPRPDKKRKYEAHFELIHYAGSVPYNIIGWLEKNKDPLNETVVGIFQKSSNKLLASLFESYVGADSADQGGEKKRKKGASFQTVSSL
HKENLNKLMTNLRSTAPHFVRCIIPNESKTPGEMDAFLVLHQLRCNGVLEGIRICRKGFPNRVLYADFKQRYRILNPGAIPEDKFVDSRKAAE
KLLASLDIDHNQYRFGHTKVFFKAGLLGHLEEMRDERLAKILTMIQARARGRLMRIEFQKIVERRDALLVIQWNIRAFMAVKNWPWMKLFFKI
KPLLKSAETEKEMANMKEEFLKLKEALEKSEARRKELEEKQVSLVQEKNDLLLQLQAEQDTLADAEERCDLLIKSKIQLEAKVKELTERVEDE
EEMNSELTSKKRKLEDECSELKKDIDDLEITLAKVEKEKHATENKVKNLTEEMATLDENISKLTKEKKSLQEAHQQVLDDLQAEEDKVNTLSK
AKVKLEQQVDDLEGSLEQEKKVRMDLERAKRKLEGDLKLTQESVMDLENDKLQMEEKLKKKEFEMSQLNSKIEDEQAIVMQLQKKIKELQARI
EELEEELEAERAARAKVEKQRSDLARELEVLSERLEEAGGATAAQLEMNKKREAEFLKLARDLEEATLHYEATAAALRKKHADSVAEMGEQLD
NLQRVKQKLEKEKSELKMEVDDLTSNMEQTVKGKANAEKLCRTYEDHLNETKTKLDEMTRLMNDLTTQKTKLQSENGEFVRQLEEKESLISQL
SRGKTSFTQQIEELRRQLEEETKSKNALAHALQAARHDCDLLREQYEEEQEAKAELQRALSKGNAEVAQWRTKYETDAIQRTEELEDAKKKLA
ARLQEAEEAIEAANAKCSSLEKTKHRLQNELEDMMIDLEKANSAAASLDKKQRGFDKIINDWKQKYEESQAELEASQKEARSLSTELFKLKNA
YEETLDHLETLKRENKNLQEEISDLTNQISEGNKNLHEIEKVKKQVEQEKSEVQLALEEAEGALEHEESKTLRFQLELSQLKADFERKLAEKD
EEMENIRRNQQRTIDSLQSTLDSEARSRNEAIRLKKKMEGDLNEMEIQLSHANRHAAEATKSARGLQTQIKELQVQLDDLGHLNEDLKEQLAV
SDRRNNLLQSELDELRALLDQTERARKLAEHELLEATERVNLLHTQNTSLINQKKKLEGDISQMQNEVEESIQECRNAEEKAKKAITDAAMMA
EELKKEQDTSAHLERMKKNMEQTIKDLQKRLDEAEQIALKGGKKQIQKLESRVRELENELENELRRNSDAQKGARKFERRIKEVTYQSEEDKK
NLARMQDLIDKLQLKVKSYKHQAEEAEAQANLYLSKYRKQQHDLDDAEERAEIAESQVNKLRSKSRDIGMKKVHEEE (SEQ ID NO: 74)
>sp|Q90688|MYPC3_CHICK Myosin-binding protein C, cardiac-type OS = Gallus gallus OX = 9031
GN = MYBPC3 PE = 1 SV = 3
MPEPAKKAVSAFTKKPKTTEVAAGSTAVFEAETEKTGIKVKWQRAGTEITDSEKYAIKAEGNKHSLTISNVGKDDEVTYAVIAGTSKVKFELK
VKEPEKSEPVAPAEASPAPAASELPAPPVESNQNPEVPPAETQPEEPVDPIGLFVTRPQDGEVTVGGNITFTAKVAGESLLKKPSVKWFKGKW
MDLASKVGKHLQLHDNYDRNNKVYTFEMEIIEANMTFAGGYRCEVSTKDKFDSSNFNLIVNEAPVSGEMDIRAAFRRTSLAGGGRRMTSAFLS
TEGLEESGELNFSALLKKRDSFLRTANRGDGKSDSQPDVDVWEILRKAPPSEYEKIAFQYGITDLRGMLKRLKRIKKEEKKSTAFLKKLDPAY
QVDKGQKIKLMVEVANPDADVKWLKNGQEIQVSGSKYIFEAIGNKRILTINHCSLADDAAYECVVAEEKSFTELFVKEPPILITHPLEDQMVM
VGERVEFECEVSEEGATVKWEKDGVELTREETFKYRFKKDGKKQYLIINESTKEDSGHYTVKTNGGVSVAELIVQEKKLEVYQSIADLTVKAR
DQAVFKCEVSDENVKGIWLKNGKEVVPDERIKISHIGRIHKLTIEDVTPGDEADYSFIPQGFAYNLSAKLQFLEVKIDFVPREEPPKIHLDCL
GQSPDTIVVVAGNKLRLDVPISGDPTPTVIWQKVNKKGELVHQSNEDSLTPSENSSDLSTDSKLLFESEGRVRVEKHEDHCVFIIEGAEKEDE
GVYRVIVKNPVGEDKADITVKVIDVPDPPEAPKISNIGEDYCTVQWQPPTYDGGQPVLGYILERKKKKSYRWMRLNFDLLKELTYEAKRMIEG
VVYEMRIYAVNSIGMSRPSPASQPFMPIAPPSEPTHFTVEDVSDTTVALKWRPPERIGAGGLDGYIVEYCKDGSAEWTPALPGLTERTSALIK
DLVTGDKLYFRVKAINLAGESGAAIIKEPVTVQEIMQRPKICVPRHLRQTLVKKVGETINIMIPFQGKPRPKISWMKDGQTLDSKDVGIRNSS
TDTILFIRKAELHHSGAYEVTLQIENMTDTVAITIQIIDKPGPPQNIKLADVWGFNVALEWTPPQDDGNAQILGYTVQKADKKTMEWYTVYDH
YRRTNCVVSDLIMGNEYFFRVFSENLCGLSETAATTKNPAYIQKTGTTYKPPSYKEHDFSEPPKFTHPLVNRSVIAGYNTTLSCAVRGIPKPK
IFWYKNKVDLSGDAKYRMFSKQGVLTLEIRKPTPLDGGFYTCKAVNERGEAEIECRLDVRVPQ (SEQ ID NO: 75)
>tr|F1NBZP|F1NBZ9_CHICK Myosin-binding protein C, cardiac-type OS = Gallus gallus OX = 9031
GN = MYBPC3 PE = 4 SV = 3
MPEPAKKAVSAFTKKPKTTEVAAGSTAVFEAETEKTGIKVKWQRAGTEITDSEKYAIKAEGNKHSLTISNVGKDDEVTYAVIAGTSKVKFELK
VKEPEKSEPVAPAEASAPAASELPAPPVESNQNPEVPPAETQPEEPVDPIGLFVTRPQDGEVTVGGNITFTAKVAGESLLKKPSVKWFKGKWM
DLASKVGKHLQLHDNYDRNNKVYTFEMEIIEANMTFAGGYRCEVSTKDKFDSSNFNLIVNEAPVSGEMDIRAAFRRTSLAGGGRRMTSAFLST
EGLEESGELNFSALLKKSSSFLRTANRGDGKSDSQPDVDVWEILRKAPPSEYEKIAFQYGITDLRGMLKRLKRIKKEEKKSTAFLKKLDPAYQ
VDKGQKIKLMVEVANPDADVKWLKNGQEIQVSGSRYIFEAIGNKRILTINHCSLADDAAYECVVAEEKSFTELFVKEPPILITHPLEDQMVMV
GERVEFECEVSEEGATVKWEKDGVELTREETFKYRFKKDGKKQYLIINESTKEDSGHYTVKTNGGVSVAELIVQEKKLEVYQSIADLTVKARD
QAVFKCEVSDENVKGIWLKNGKEVVPDERIKISHIGRIHKLTIEDVTPGDEADYSFIPQGFAYNLSAKLQFLEVKIDFVPREEPPKIHLDCLG
QSPDTIVVVAGNKLRLDVPISGDPTPTVIWQKVNKKGELVHQSNEDSLTPSENSSDLSTDSKLLFESEGRVRVEKHEDHCVFIIEGAEKEDEG
VYRVIVKNPVGEDKADITVKVIDVPDPPEAPKISNIGEDYCTVQWQPPTYDGGQPVLGYILERKKKKSYRWMRLNFDLLKELTYEAKRMIEGV
VYEMRIYAVNSIGMSRPSPASQPFMPIAPPSEPTHFTVEDVSDTTVALKWRPPERIGAGGLDGYIVEYCKDGSAEWTPALPGLTERTSALIKD
LVTGDKLYFRVKAINLAGESGAAIIKEPVTVQEIMQRPKIWLPRHLRQTLVKKVGETINIMIPFQGKPRPKISWMKDGQTLDSKDVGIRNSST
DTILFIRKAELHHSGAYEVTLQIENMTDTVAITIQIIDKPGPPQNIKLADVWGFNVALEWTPPQDDGNAQILGYTVQKADKKTMEWYTVYDHY
RRTNCVVSDLIMGNEYFFRVFSENLCGLSETAATTKNPAYIQKTGTTYKPPSYKEHDFSEPPKFTHPLVNRSVIAGYNTTLSCAVRGIPKPKI
FWYKNKVDLSGDAKYRMFSKQGVLTLEIRKPTPFDGGFYTCKAVNERGEAEIECRLDVRVPQ (SEQ ID NO: 76)
>NP_998735.1 troponin I, cardiac muscle [Gallus gallus]
MAEEEEPKPPPLRRKSSANYRGYAVEPHAKRQSKISASRKLQLKTLLLQRAKRELEREEQERAGEKQRHLGELCPPPELEGLGVAQLQELCRE
LHARIGRVDEERYDMGTRVSKNMAEMEELRRRVAGGRFVRPALRRVRLSADAMMAALLGSKHRVGTDLRAGLRQVRKDDAEKESREVGDWRKN
VDALSGMEGRKKKFEAPGGGQG (SEQ ID NO: 77)
>tr|A0A1D5PF28|A0A1D5PF28_CHICK Troponin T, cardiac muscle isoforms OS = Gallus gallus
OX = 9031 GN = TNNT2 PE = 4 SV = 1
MKQKHQEKGESKPKPKPFMPNLVPPKIPDGERLDFDDIHRKRMEKDLNELQALIEAHFESRKKEEEELISLKDRIEQRRAERAEQQRIRSERE
KERQARMAEERARKEEEEARKKAEEEARKKKAFSNMLHEGGYMQKSEKKGGKKQTEREKKKKILSERRKPLNIDHLSEDKLRDKAKELWQTIR
DLEAEKFDLQEKFKRQKYEINVLRNRVSDHQKV (SEQ ID NO: 78)
>sp|F1RRT2|MYL4_PIG Myosin light chain 4 OS = Sus scrofa OX = 9823 GN = MYL4 PE = 1 SV = 3
MPPKKPEPKKEAAKAAPAPAPAPAPAPAPPPEPAKEPTFDPKSIKIDFTADQIEEFKEAFSLFDRTPTGEMKITYGQCGDVLRALGQNPTNAE
VLRVLGKPKPEEMNAKMLDFETFLPILQHISRNKEQGTYEDFVEGLRVFDKESNGTVMGAELRHVLATLGEKMTEAEVEQLLAGQEDANGCIN
YEAFVKHIMSG (SEQ ID NO: 79)
>tr|Q910C5|Q910C5_CHICK Chick atrial myosin heavy chain OS = Gallus gallus OX = 9031 PE = 2
SV = 1
MEALLGAAAPFLRAPEGPRPTPAGDTRGLCFVPHPQLEFIRARVTARAGNGVTVTTEMGETLTVPEADVHPQNPPKFDRIEDMAMLTFLHEPA
VLYNLKERYASWMIYTYSGLFCVTVNPYKWLPVYNAEVVAAYRGKKRTEVPPHIFSISDNAYQNMLTDRENQSILITGESGAGKTVNTKRVIQ
YFASIAAIGHRKKEVANSSKGTLEDQIIQANPALEAFGNAKTVRNDNSSRFGKFIRIHFGATGKLASADIETYLLEKSRVIFQLKAERNYHIF
YQILSNKKPELLEMLLITNNPYDYSYVSQGEVTVASIDDSEELLATDSAFDVLGFTAEEKAGVYKLTGAIMHFGNMKFKQKQREEQAEPDGTE
DCDKSAYLMGLNSADLLKGLCHPRVKVGNEYVTKGQSVQQVYYSIGALAKAVYEKMFNWMVVRINNSLETKQPRQYFIGVLDIAGFEIFDFNS
FEQLCINFTNEKLQQFFNHHMFVLEQEEYKKEGIEWEFIDFGMDLQACIDLIEKPMGIMSILEEECMFPKASDMTFKAKLFDNHLGKSANFGK
PRNVKGKSEAHFSLIHYAGTVDYNIIGWLEKNKDPLNETVVGLYQKSALKLLASLFSNYAGADAGGDGGKGKGAKKKGSSFQTVSALHRENLN
KLMANLKTTHPHFVRCLIPNERKEPGVMDNPLVMHQLRCNGVLEGIRICRKGFPNRILYGDFRQRYRIPNPTAIPEGQFIDSRKGAEKLLGSL
DIDHNQYKFGHTKVFFKAGLLGLLEEMRDERLSLIITRIQAQARGQLMRIEFKKILERRDALLVIQWNIRAFMGVKNWPWMKLYFKIKPLLKS
AETEKEMQTMKEEFGHLKEALEKSAARRKELEEKMVSMLQEKNDLQLQVQAEQDNLADAEERCDQLIKNKIQLEAKVKEMTERLEEEEEMNAE
LAAKKRKLEDECSELKKDIDDLELSLAKVEKEKHATENKVKNLTEEMAGLDENITKLTKEKKILQESHQQALDDLQAEEDKVNTLAKAKGKLE
QQVDDLESSLEQEKKIRMDLERAKRKLEGDLKLAQESIMDLENDKQQLEERLKKKDFELNTLNARIEDEQAISAQLQKKLKELQARIEELEEE
LEAERTGRAKVEKLRSELLQELEETSERLEEAGGATSVQLELNKKREAEFQKLRRDLEEATLQHEATAATLRKKHADSVAELSEQLDNLQRVK
QKLEKEKSELKLELDDVNSNTEQLIKAKTNLEKMCRTTEDQMNEHRSKLEEAQRTVTDLSTQRAKLQTENSELSRQLEEKEAFINQLTRGKLT
YTQQLEDLKRQLEEEAKAKNALAHALQSAQHDCDLLREQYEEEMEAKAELQRALSKANSEVAQWRTKYETDAIQRTEELEEAKKKLAQRLQEA
EEAVEAVNAKCSSLEKTKHRLQNEIEDLMADVERSNAAAAALDKKQRNFDKILSEWKQKFEESQTELEASQKEARSLSTELFKLKNAYEESLE
HLETFKRENKNLQEEILDLTEQLGASQKSIHELEKVRKQLDAEKLELQAALEEAEASLEHEEGKILRAQLEFNQVKADYERKLAEKDEEIEQS
KRNHLRVVDSLQTSLDAETRSRNEALRLKKKMEGDLNEMEIQLSHANRTAAEAQKQVKALQGYLKDTQLQLDDVVRANEDLKENIAIVERRNN
LLQSELEELRAMVEQSERARKLAEQELIEASERVQLLHSQNTSLINQKKKMEADISQLQTEVEEAIQECRNAEEKAKKAITDAAMMAEELKKE
QDTSAHLERMKKNMEQTVKDLQLRLDEAEQLALKGGKKQLQKLEVRVRELENELEAEQKRNAESIKGLRKSERRVKELSYQTEEDRKNMVRLQ
DLVDKLQLKVKAYKRQAEEAEEQANSNLAKFRKVQHELDEAEERADMAESQVNKLRARSRDIGAKKGLNEE (SEQ ID NO: 80)
>tr|Q8UWA0|Q8UWA0_CHICK Myosin heavy chain OS = Gallus gallus OX = 9031 GN = SSMHC PE = 2
SV = 1
MSMLDMSEFGEAAEYLRKSYTEQLKLQTIPFDGKKRAWIPDEKEAYIEVEIKESTGGKVTVETKDKQTRVVKEDELQAMNPPKFDMIEDMAML
THLNEASVLYNLKRRYSHWMIYTYSGLFCVTINPYKWLPVYTAPVVAAYKGKRRSEAPPHIYSIADNAYNDMLRNRENQSMLITGESGAGKTV
NTKRVIQYFAIVAALGDTPGKKVAALATKTGGTLEDQIIEANPAMEAFGNAKTIRNDNSSRFGKFIRIHFGPSGKLASADIDIYLLEKSRVIF
QQPKERSYHIYYQILSGKKPELQDMLLLSLNPYDYHFCSQGVTTVDNLDDGEELMATDHAMDILGFSNDEKYGSYKIVGAIMHFGNMKFKQKQ
REEQAEADGTESADKAAYLMGISSADLIKGLLHPRVKVGNEYVTKGQNVEQVVYAVGALAKATYDRMFKWLVTRINKTLDTKLARQFFIGVLD
IAGFEIFDFNSFEQLCINFTNEKLQQFFNHHMFVLEQEEYKKEGIEWVFIDFGLDLQACIDLIEKPLGILSILEEECMFPKASDMSFKAKLYD
NHLGKSPNFQKPRPDKKRKYEAHFELVHYAGVVPYNIIGWLDKNKDPLNETVVAVFQKSQNKLLASLYENYVGSSSEEPHKPGSKEKRKKAAS
FQTVSQLHKENLNKLMTNLRSTQPHFVRCIIPNETKTPGAMDAFLVLHQLRCNGVLEGIRICRKGFPNRILYADFKQRYRILNPAAIPDDKFV
DSRKATEKLLSSLELDHSQYKFGHTKVFFKAGLLGMLEEMRDERLAKILTMLQARIRGHLMRIEYQKIISRREALYTIQWNIRAFNAVKNWSW
MKLFFKIKPLLKSAQTEKEMSTLKEEFQKLKEALEKSEAKRKELEEKQVSMIQEKNDLALQLQAEQDNLADAEERCDLLIKSKIQLEAKVKEL
TERVEDEEEMNADLTAKKRKLEDECAELKKDIDDLEITLAKVEKEKHATENKVKNLIEEMAALDEIIAKLTKEKKALQEAHQQALDDLQAEED
KVNTLTKAKVKLEQQVDDLESSLEQEKKIRMDLERAKRKLEGDLKLTQESVMDLENDKQQLEEKLKKKDFEMSQLNSRIEDQQVTEAQLQKKI
KELQARIEELEEELEAERAARAKVEKQRAEVSRELEELSERLEEAGGATSAQLEMNKKREVEFLKLRRDLEEATLQHESTAAALRKKHADSVA
ELSEQIDNLQRVKQKLEKEKSEMKMEVDDLSSNIEYLTKNKANAEKLCRTYEDQLSEAKSKVDELQRQLTDVSTQRGRLQTENGELSRLLEEK
ESFINQLSRGKTSFTQTIEELKRQLEEETKSKNALAHALQASRHDCDLLREQYEEEVEAKSELQRNLSKANAEVAQWRTKYETDAIQRTEELE
EAKKKLAIRLQEAEEAVEAAHAKCSSLEKTKHRLQTEIEDLSVDLERANSACAALDKKQRNFDRILAEWKQKYEETQAELEASQKESRSLSTE
LFKLKNAYEESLDNLETLKRENKNLQEEIADLTDQISMSGKTIHELEKLKKALENEKSDIQAALEEAEGALEHEESKTLRIQLELNQIKADVD
RKLAEKDEEFENLRRNHQRAMDSMQATLDAEARAKNEAVRLRKKMEGDLNEMEIQLSHANRQAAEFQKLGRQLQAQIKDLQIELDDTQRQNDD
LKEQAAALERRNNLLLAEVEELRAALEQAERSRKLAEQELLEATERVNLLHSQNTGLINQKKKLETDISQLSSEVEDAVQECRNAEEKAKKAI
TDAAMMAEELKKEQDTSAHLERMKKNMEQTIKDLQMRLDEAEQIALKGGKKQIQKLEARVRELEGELDMEQKKMAEAQKGIRKYERRIKELSY
QTEEDRKNLTRMQDLIDKLQSKVKSYKRQFEEAEQQANSNLVKYRKVQHELDDAEERADIAETQVNKLRARTKEVITFKHE
(SEQ ID NO: 81)
>sp|P79293|MYH7_PIG Myosin-7 OS = Sus scrofa OX = 9823 GN = MYH7 PE = 2 SV = 2
MVDAEMAAFGEAAPYLRKSEKERLEAQTRPFDLKKDVYVPDDKEEFVKAKILSREGGKVTAETEHGKTVTVKEDQVLQQNPPKFDKIEDMAML
TFLHEPAVLYNLKERYASWMIYTYSGLFCVTINPYKWLPVYNAEVVAAYRGKKRSEAPPHIFSISDNAYQYMLTDRENQSILITGESGAGKTV
NTKRVIQYFAVIAAIGDRSKKEQTPGKGTLEDQIIQANPALEAFGNAKTVRNDNSSRFGKFIRIHFGATGKLASADIETYLLEKSRVIFQLKA
ERDYHIFYQILSNKKPELLDMLLITNNPYDYAFISQGETTVASIDDAEELMATDNAFDVLGFTSEEKNSMYKLTGAIMHFGNMKFKLKQREEQ
AEPDGTEEADKSAYLMGLNSADLLKGLCHPRVKVGNEYVTKGQNVQQVMYATGALAKAVYEKMFNWMVTRINTTLETKQPRQYFIGVLDIAGF
EIFDFNSFEQLCINFTNEKLQQFFNHHMFVLEQEEYKKEGIEWEFIDFGMDLQACIDLIEKPMGIMSILEEECMFPKATDMTFKAKLYDNHLG
KSNNFQKPRNIKGRPEAHFALIHYAGTVDYNIIGWLQKNKDPLNETVVDLYKKSSLKLLSNLFANYAGADTPVEKGKGKAKKGSSFQTVSALH
RENLNKLMTNLRSTHPHFVRCIIPNETKSPGVIDNPLVMHQLRCNGVLEGIRICRKGFPNRILYGDFRQRYRILNPAAIPEGQFIDSRKGAEK
LLGSLDIDHNQYKFGHTKVFFKAGLLGLLEEMRDERLSRIITRIQAQSRGVLSRMEFKKLLERRDSLLIIQWNIRAFMSVKNWPWMKLYFKIK
PLLKSAETEKEMATMKEEFGRLKEALEKSEARRKELEEKMVSLLQEKNDLQLQVQAEQDNLADAEERCDQLIKNKIQLEAKVKEMTERLEDEE
EMNAELTAKKRKLEDECSELKRDIDDLELTLAKVEKEKHATENKVKNLTEEMAGLDEIIAKLTKEKKALQEAHQQALDDLQAEEDKVNTLTKA
KVKLEQHVDDLEGSLEQEKKVRMDLERAKRKLEGDLKLTQESIMDLENDKQQLDERLKKKDFELNALNARIEDEQALGSQLQKKLKELQARIE
ELEEELEAERTARAKVEKLRSDLSRELEEISERLEEAGGATSVQIEMNKKREAEFQKMRRDLEEATLQHEATAAALRKKHADSVAELGEQIDN
LQRVKQKLEKEKSEFKLELDDVTSNMEQIIKAKANLEKMCRTLEDQMNEHRSKAEETQRSVNDLTSQRAKLQTENGELSRQLDEKEALISQLT
RGKLTYTQQLEDLKRQLEEEVKAKNALAHALQSARHDCDLLREQYEEETEAKAELQRVLSKANSEVAQWRTKYETDAIQRTEELEEAKKKLAQ
RLQDAEEAVEAVNAKCSSLEKTKHRLQNEIEDLMVDVERSNAAAAALDKKQRNFDKILAEWKQKYEESQSELESSQKEARSLSTELFKLKNAY
EESLEHLETFKRENKNLQEEISDLTEQLGSSGKTIHELEKVRKQLEAEKLELQSALEEAEASLEHEEGKILRAQLEFNQIKAEMERKLAEKDE
EMEQAKRNHLRVVDSLQTSLDAETRSRNEALRVKKKMEGDLNEMEIQLSHANRMAAEAQKQVKSLQSLLKDTQIQLDDAVRANDDLKENIAIV
ERRNNLLQAELEELRAVVEQTERSRKLAEQELIETSERVQLLHSQNTSLINQKKKMEADLSQLQTEVEEAVQECRNAEEKAKKAITDAAMMAE
ELKKEQDTSAHLERMKKNMEQTIKDLQHRLDEAEQIALKGGKKQLQKLEARVRELENELEAEQKRNAESVKGMRKSERRIKELTYQTEEDRKN
LLRLQDLVDKLQLKVKAYKRQAEEAEEQANTNLSKFRKVQHELDEAEERADIAESQVNKLRAKSRDIGTKGLNEE (SEQ ID NO: 82)
>tr|E1B3J10|E1BJ10_BOVIN Myosin binding protein H like OS = Bos taurus OX = 9913
GN = MYBPHL PE = 4 SV = 1
MEAATAPEAALRPTLKVKEASPADADGPQASPRRGTGSPLSQLLPPIEEHPKIWLPRALRQTYIRKVGDTVNLLIPFQGKPKPQAIWTRDGCA
LDTSRVSVRNGERDSILFIREAQRADSGRYQLSVQLGGLEATATIDILVIERPGPPQSIKLVDVWGSSATLEWTPPQDTGNAALLGYTVQKAD
TKSGLWFTVLERCRRASCTVPNLIVGNSYTFRVFAENQCGLSENAPITADLAHIQKAATVYRTEGFAQRDFSEAPKFTQPLADCTTVIGYDTQ
LFCCVRASPKPKIIWLKNKMDIQGNPKYRALTHLGICSLEIRKPGPFDGGIYTCKAVNPLGEASVDCRVDVKAPN (SEQ ID NO: 83)
>sp|P02540|DESM_PIG Desmin OS = Sus scrofa OX = 9823 GN = DES PE = 1 SV = 4
MSQAYSSSQRVSSYRRTFGGAPSFPLGSPLSSPVFPRAGFGTKGSSSSVTSRVYQVSRTSGGAGGLGPLRASRLGATRVPSSSYGAGELLDFS
LADAVNQEFLTTRTNEKVELQELNDRFANYIEKVRFLEQQNAALAAEVNRLKGREPTRVAEIYEEELRELRRQVEVLTNQRARVDVERDNLLD
DLQRLKAKLQEEIQLKEEAENNLAAFRADVDAATLARIDLERRIESLNEEIAFLKKVHEEEIRELQAQLQEQQVQVEMDMSKPDLTAALRDIR
AQYETIAAKNISEAEEWYKSKVSDLTQAANKNNDALRQAKQEMMEYRHQIQSYTCEIDALKGTNDSLMRQMRELEDRFASEASGYQDNIARLE
EEIRHLKDEMARHLREYQDLLNVKMALDVEIATYRKLLEGEESRINLPIQTFSALNFRETSPEQRGSEVHTKKTVMIKTIETRDGEVVSEATQ
QQHEVL (SEQ ID NO: 84)
>tr|F1SFP9|F1SFP9_PIG Leiomodin 3 OS = Sus scrofa OX = 9823 GN = LMOD3 PE = 4 SV = 3
MSEHSRNSDQEEPFDREIDEDEILANLSPEELKELQSEMDVMAPDPRLPVGMIQKDQTDKPPTGNFDHKSLVDYMYWQKASRRMLEDERVPVT
FVPSEEKPQEQRKEIDKGNKNMSQYLKEKLNNEIAAHKRESKSSDNEQETNDDDEDNEDDEDDEEDDAEDEEDEGDESDEKTKGEEEGEVKEP
IRNGESNCQQVPNKAFEEQKDRPEAQEKFEKKISKLDPKKLALDTSFLKVSARPSGNQTDLDGSLRRVRQNDPDMKELNLNNIENIPKEMLLD
FVNAMKKNKHIKTFSLANVGADESVAFALANMLRENRSITTLNIESNFITGKGIVAIMRCLQFNETLTELREHNQRHMLGHHAEMEISRLLKA
NTTLLKMGYHFELPGPRMVVTNLLTRNQDKQRQKRQEEQKQQQLKEQKKLIAMLENGLGLPPGMWEMLGGPMPDSQMQEFLQPPPPKSLHPQT
APFSRRNEVMAKPAQPPKYRTDPDSFRVVKLKRIQRKSRMPEAREPPEKTNLKDVIKTLKPVPRNRPPPLVEITPRDQLLNDIRHSNIAYLKP
VQLPKELA (SEQ ID NO: 85)
>sp|Q5KR49|TPM1_BOVIN Tropomyosin alpha-1 chain OS = Bos taurus OX = 9913 GN = TPM1 PE = 2
SV = 1
MDAIKKKMQMLKLDKENALDRAEQAEADKKAAEDRSKQLEDELVSLQKKLKATEDELDKYSEALKDAQEKLELAEKKATDAEADVASLNRRIQ
LVEEELDRAQERLATALQKLEEAEKAADESERGMKVIESRAQKDEEKMEIQEIQLKEAKHIAEDADRKYEEVARKLVIIESDLERAEERAELS
EGKCAELEEELKTVTNNLKSLEAQAEKYSQKEDKYEEEIKVLSDKLKEAETRAEFAERSVTKLEKSIDDLEDELYAQKLKYKAISEELDHALN
DMTSI (SEQ ID NO: 86)
>tr|F1NK75|F1NK75_CHICK Uncharacterized protein OS = Gallus gallus OX = 9031 GN = TPM4 PE = 3
SV = 2
MEAIKKKMQMLKLDKENAIDRAEQAETDKKAAEDKCKQVEDELVALQKKLKGTEDELDKYSEALKDAQEKLEQAEKKATDAEGEVAALNRRIQ
LVEEELDRAQERLATALQKLEEAEKAADESERGMKVIENRAMKDEEKMEIQEMQLKEAKHIAEEADRKYEEVARKLVILEGELERAEERAEVS
EVKCSDLEEELKNVTNNLKSLEAQSEKYSEKEDKYEEEIKILSDKLKEAETRAEFAERTVAKLEKSIDDLEDELYAQKLKYKAISEELDHALN
DMTSL (SEQ ID NO: 87)
>tr|H9L074_H9L074_CHICK Uncharacterized protein OS = Gallus gallus OX = 9031 GN = TPM3 PE = 3
SV = 3
MEAIKKKMQMLKLDKENALDRAEQAEAEQKQAEERSKQLEDELAAMQKKLKGTEDELDKYSEALKDAQEKLELAEKKAADAEAEVASLNRRIQ
LVEEELDRAQERLATALQKLEEAEKAADESERGMKVIENRALKDEEKMELQEIQLKEAKHIAEEADRKYEEVARKLVIIEGDLERTEERAELA
ESKCSELEEELKNVTNNLKSLEAQAEKYSQKEDKYEEEIKILTDKLKEAETRAEFAERSVAKLEKTIDDLEDELYAQKLKYKAISEELDHALN
DMTSMARRALQESSFGEMGHLPWFPEPQRVYPVSGRVDFFSGMGGLTYGLKRT (SEQ ID NO: 88)
>sp|E1ETG2|LMOD2_CHICK Leiomodin-2 OS = Gallus gallus OX = 9031 GN = LMOD2 PE = 1 SV = 2
MSTFGYRRELSKYEDIDEDELLASLTEEELKELERELEDIEPDRNLPVGQRQKSLTEKTPTGTFSREALMAYWERETRKLLEKERLGACEKDS
EQEEDNSEDIQEECFTESNSEVSEEAYTEEDDEEEEEEEEEEEDEDDSDDEDEEKQNSAASERPVNCEDGRSSSHVRHKKCSNAKNSENLFNG
HDGKDTENLSFKSSAIHPCGNPTVIEDALEKVRSNDPETTEVNLNNIENITSQMLIQFSQALRDNTVVKSFSLANTHADDNVAIAIAGMLKVN
QHITSLNIESNFITGKGVLAIMRALQHNKVLTELRFHNQRHIMGSQVEMDIVKLLKENTTLVKLGYHFDLAGPRMSMTSILTRNMDKQRQKRM
QEQRQQEYGCDGAINPKTKVLQKGTPRSSPYTSPKSSPWSSPKLPRKSAPAKSQPPAPAPPPPPPPPPPPPPPPPPVIPDKKAPTRNIAEVIK
QQESSRKALQNGQKKKKGKKGKKHENSILKEIKDSLKSVSDRKSEEGSRPSTRPSTPQRSLHDNLMEAIRASSIKQLRRVEVPEALR
(SEQ ID NO: 89)
>sp|Q6QGC0|PDLI3_PIG PDZ and LIM domain protein 3 OS = Sus scrofa OX = 9823 GN = PDLIM3
PE = 2 SV = 1
MPQNVILPGPAPWGFRLSGGIDFNQPLIITRITPGSKAAAANLCPGDVILAIDGYGTESMTHADAQDRIKAAAHQLCLKIDRAETRLWSPQVT
EDGKAHPFKINLESEPQDVNYFEHKHNIRPKPFIIPGRSSGCSTPSGIDGGSGRSTPSSVSTLSTICPGDLKVAAKMAPNIPLEMELPGVKIV
HAQFNTPMQLYSDDNIMETLQGQVSTALGETPSMSEPTTASVPPQSDVYRMLHDNRNEPTQPRQSGSFRVLQELVNDGPDDRPAGTRSVRAPV
TKIHGGAGGTQKMPLCDKCGSGIVGAVVKARDKYRHPECFVCADCNLNLKQKGYFFVEGELYCETHARARMRPPEGYDTVTLYPKA
(SEQ ID NO: 90)
>tr|Q3MHM1|Q3MHM1_BOVIN Calsequestrin OS = Bos taurus OX = 9913 GN = CASQ2 PE = 2 SV = 1
MTPSKSSKAPFTFLPSAFLGKKHFAQMKRAHLFVVGVYLLSSCRAEEGLNFPTYDGKDRVVSLTEKNFKQVLKKYDLLCLYYHEPLSSDKVVQ
KQFQLKEIVLELVAQVLEHKDIGFVMVDAKKEAKLAKKLGFDEEGSLYILKGDRTIEFDGEFAADVLVEFLLDLIEDPVEIINSKLEVQAFER
IEDHIKLIGFFKSEESEHYKAFEEAAEHFQPYIKFFATFDKGVAKKLSLKMNEVDFYEPFMDEPIAIPDKPYTEEELVEFVKEHQRPTLRRLR
PEDMFETWEDDLNGIHIVAFAERSDPDGYEFLEILKQVARDNTDNPDLSIVWIDPDDFPLLVAYWEKTFKIDLFKPQIGVVNVTDADSVWMDI
PDDDDLPTAEELEDWIEDVLSGKINTEDDDNDDEEDEDDDDDDDNSDEEDNDDSDDDDE (SEQ ID NO: 91)
Smooth muscle tissue
>sp|P08023|ACTA_CHICK Actin, aortic smooth muscle OS = Gallus gallus OX = 9031 GN = ACTA2
PE = 3 SV = 2
MCEEEDSTALVCDNGSGLCKAGFAGDDAPRAVFPSIVGRPRHQGVMVGMGQKDSYVGDEAQSKRGILTLKYPIEHGIITNWDDMEKIWHHSFY
NELRVAPEEHPTLLTEAPLNPKANREKMTQIMFETFNVPAMYVAIQAVLSLYASGRTTGIVLDSGDGVTHNVPIYEGYALPHAIMRLDLAGRD
LTDYLMKILSERGYSFVTTAEREIVRDIKEKLCYVALDFENEMATAASSSSLEKSYELPDGQVITIGNERFRCPETLFQPSFIGMESAGIHET
TYNSIMKCDIDIRKDLYANNVLSGGTTMYPGIADRMQKEITALAPSTMKIKIIAPPERKYSVWIGGSILASLSTFQQMWISKQEYDEAGPSIV
HRKCF (SEQ ID NO: 92)
>sp|P63270|ACTH_CHICK Actin, gamma-enteric smooth muscle OS = Gallus gallus OX = 9031
GN = ACTG2 PE = 1 SV = 1
MCEEETTALVCDNGSGLCKAGFAGDDAPRAVFPSIVGRPRHQGVMVGMGQKDSYVGDEAQSKRGILTLKYPIEHGIITNWDDMEKIWHHSFYN
ELRVAPEEHPTLLTEAPLNPKANREKMTQIMFETFNVPAMYVAIQAVLSLYASGRTTGIVLDSGDGVTHNVPIYEGYALPHAIMRLDLAGRDL
TDYLMKILTERGYSFVTTAEREIVRDIKEKLCYVALDFENEMATAASSSSLEKSYELPDGQVITIGNERFRCPETLFQPSFIGMESAGIHETT
YNSIMKCDIDIRKDLYANNVLSGGTTMYPGIADRMQKEITALAPSTMKIKIIAPPERKYSVWIGGSILASLSTFQQMWISKPEYDEAGPSIVH
RKCF (SEQ ID NO: 93)
>sp|P24032|MLRN_CHICK Myosin regulatory light chain 2, smooth muscle minor isoform
OS = Gallus gallus OX = 9031 PE = 2 SV = 2
MSSKRAKTKTTKKRPQRATSNVFAMFDQSQIQEFKEAFNMIDQNRDGFIDKEDLHDMLASLGKNPTDEYLDAMMNEAPGPINFTMFLTMFGEK
LNGTDPEDVIRNAFACFDEEATGFIQEDYLRELLTTMGDRFTDEEVDELYREAPIDKKGNFNYIEFTRILKHGAKDKDD
(SEQ ID NO: 94)
>sp|P10587|MYH11_CHICK Myosin-11 OS = Gallus gallus OX = 9031 GN = MYH11 PE = 1 SV = 4
MSQKPLSDDEKFLFVDKNFVNNPLAQADWSAKKLVWVPSEKHGFEAASIKEEKGDEVTVELQENGKKVTLSKDDIQKMNPPKFSKVEDMAELT
CLNEASVLHNLRERYFSGLIYTYSGLFCVVINPYKQLPIYSEKIIDMYKGKKRHEMPPHIYAIADTAYRSMLQDREDQSILCTGESGAGKTEN
TKKVIQYLAVVASSHKGKKDTSITQGPSFSYGELEKQLLQANPILEAFGNAKTVKNDNSSRFGKFIRINFDVTGYIVGANIETYLLEKSRAIR
QAKDERTFHIFYYLIAGASEQMRNDLLLEGFNNYTFLSNGHVPIPAQQDDEMFQETLEAMTIMGFTEEEQTSILRVVSSVLQLGNIVFKKERN
TDQASMPDNTAAQKVCHLMGINVTDFTRSILTPRIKVGRDVVQKAQTKEQADFAIEALAKAKFERLFRWILTRVNKALDKTKRQGASFLGILD
IAGFEIFEINSFEQLCINYTNEKLQQLENHTMFILEQEEYQREGIEWNFIDEGLDLQPCIELIERPTNPPGVLALLDEECWFPKATDTSFVEK
LIQEQGNHAKFQKSKQLKDKTEFCILHYAGKVTYNASAWLTKNMDPLNDNVTSLLNQSSDKFVADLWKDVDRIVGLDQMAKMTESSLPSASKT
KKGMFRTVGQLYKEQLTKLMTTLRNTNPNFVRCIIPNHEKRAGKLDAHLVLEQLRCNGVLEGIRICRQGFPNRIVFQEFRQRYEILAANAIPK
GFMDGKQACILMIKALELDPNLYRIGQSKIFFRTGVLAHLEEERDLKITDVIIAFQAQCRGYLARKAFAKRQQQLTAMKVIQRNCAAYLKLRN
WQWWRLFTKVKPLLQVTRQEEEMQAKDEELQRTKERQQKAEAELKELEQKHTQLCEEKNLLQEKLQAETELYAEAEEMRVRLAAKKQELEEIL
HEMEARIEEEEERSQQLQAEKKKMQQQMLDLEEQLEEEEAARQKLQLEKVTADGKIKKMEDDILIMEDQNNKLTKERKLLEERVSDLTTNLAE
EEEKAKNLTKLKNKHESMISELEVRLKKEEKSRQELEKIKRKLEGESSDLHEQIAELQAQIAELKAQLAKKEEELQAALARLEDETSQKNNAL
KKIRELESHISDLQEDLESEKAARNKAEKQKRDLSEELEALKTELEDTLDTTATQQELRAKREQEVTVLKRALEEETRTHEAQVQEMRQKHTQ
AVEELTEQLEQFKRAKANLDKTKQTLEKDNADLANEIRSLSQAKQDVEHKKKKLEVQLQDLQSKYSDGERVRTELNEKVHKLQIEVENVTSLL
NEAESKNIKLTKDVATLGSQLQDTQELLQEETRQKLNVTTKLRQLEDDKNSLQEQLDEEVEAKQNLERHISTLTIQLSDSKKKLQEFTATVET
MEEGKKKLQREIESLTQQFEEKAASYDKLEKTKNRLQQELDDLVVDLDNQRQLVSNLEKKQKKFDQMLAEEKNISSKYADERDRAEAEAREKE
TKALSLARALEEALEAKEELERTNKMLKAEMEDLVSSKDDVGKNVHELEKSKRTLEQQVEEMKTQLEELEDELQAAEDAKLRLEVNMQAMKSQ
FERDLQARDEQNEEKRRQLLKQLHEHETELEDERKQRALAAAAKKKLEVDVKDLESQVDSANKAREEAIKQLRKLQAQMKDYQRDLDDARAAR
EEIFATARENEKKAKNLEAELIQLQEDLAAAERARKQADLEKEEMAEELASANSGRTSLQDEKRRLEARIAQLEEELDEEHSNIETMSDRMRK
AVQQAEQLNNELATERATAQKNENARQQLERQNKELRSKLQEMEGAVKSKFKSTIAALEAKIASLEEQLEQEAREKQAAAKTLRQKDKKLKDA
LLQVEDERKQAEQYKDQAEKGNLRLKQLKRQLEEAEEESQRINANRRKLQRELDEATESNDALGREVAALKSKLRRGNEPVSFAPPRRSGGRR
VIENATDGGEEEIDGRDGDFNGKASE (SEQ ID NO: 95)
>sp|P02607|MYL6_CHICK Myosin light polypeptide 6 OS = Gallus gallus OX = 9031 GN = MYL6
PE = 1 SV = 3
MCDFSEEQTAEFKEAFQLFDRTGDGKILYSQCGDVMRALGQNPTNAEVMKVLGNPKSDEMNLKTLKFEQFLPMMQTIAKNKDQGCFEDYVEGL
RVFDKEGNGTVMGAEIRHVLVTLGEKMTEEEVEQLVAGHEDSNGCINYEELVRMVLSG (SEQ ID NO: 96)
>sp|P02542|DESM_CHICK Desmin OS = Gallus gallus OX = 9031 GN = DES PE = 1 SV = 1
QSYSSSQRVSSYRRTFGGGTSPVFPRASFGSRGSGSSVTSRVYQVSRTSAVPTLSTFRTTRVTPLRTYGSAYQGAGELLDFSLADAMNQEFLQ
TRTNEKVELQELNDRFANYIEKVRFLEQQNALMVAEVNRLRGKQPTRVAEMYEEELRELRRQVDALTGQRARVEVERDNLLDNLQKLKQKLQE
EIQLKQEAENNLAAFRADVDAATLARIDLERRIESLQEEIAFLKKVHEEEIRELQAQLQEQHIQVEMDISKPDLTAALRDIRAQYESIAAKNI
AEAEEWYKSKVSDLTQAANKNNDALRQAKQEMLEYRHQIQSYTCEIDALKGTNDSLMRQMREMEERFAGEAGGYQDTIARLEEEIRHLKDEMA
RHLREYQDLLNVKMALDVEIATYRKLLEGEENRISIPMHQTFASALNFRETSPDQRGSEVHTKKTVMIKTIETRDGEVVSEATQQQHEVL
QHEVL(SEQ ID NO: 97)
>sp|P19352-2|TPM2_CHICK Isoform 2 of Tropomyosin beta chain OS = Gallus gallus OX = 9031
GN = TPM2
MEAIKKKMQMLKLDKENAIDRAEQAEADKKQAEDRCKQLEEEQQGLQKKLKGTEDEVEKYSESVKEAQEKLEQAEKKATDAEAEVASLNRRIQ
LVEEELDRAQERLATALQKLEEAEKAADESERGMKVIENRAMKDEEKMELQEMQLKEAKHIAEEADRKYEEVARKLVVLEGELERSEERAEVA
ESRVRQLEEELRTMDQSLKSLIASEEEYSTKEDKYEEEIKLLGEKLKEAETRAEFAERSVAKLEKTIDDLEESLASAKEENVGIHQVLDQTLL
ELNNL (SEQ ID NO: 98)
>sp|Q2QLE2|CAV2_PIG Caveolin-2 OS = Sus scrofa OX = 9823 GN = CAV2 PE = 3 SV = 1
MGLETEKADVQLFMDDDSYSRHSGVDYADPKKFVDPGTDRDPHRLNSNLKVGFEDVIAEPVSTHSFDKVWICSHALFEISKYVIYKFLTVFLA
IPLAFAAGILFATLSCLHIWIIIPFVKTCLMVLPSVQTIWKSVTDVVIAPLCTSAGRSFSSVSLQLSHD (SEQ ID NO: 99)
>sp|Q90623|MYPT1_CHICK Protein phosphatase 1 regulatory subunit 12A OS = Gallus gallus
OX = 9031 GN = PPP1R12A PE = 1 SV = 1
MKMADAKQKRNEQLKRWIGSETDLEPPVVKRKKTKVKFDDGAVFLAACSSGDTEEVLRLLERGADINYANVDGLTALHQACIDDNVDMVKFLV
ENGANINQPDNEGWIPLHAAASCGYLDIAEYLISQGAHVGAVNSEGDTPLDIAEEEAMEELLQNEVNRQGVDIEAARKEEERIMLRDARQWLN
SGHINDVRHAKSGGTALHVAAAKGYTEVLKLLIQARYDVNIKDYDGWTPLHAAAHWGKEEACRILVENLCDMEAVNKVGQTAFDVADEDILGY
LEELQKKQNLLHSEKREKKSPLIESTANLDNNQTQKTFKNKETLIMEQEKNASSIESLEHEKADEEEEGKKDESSCSSEEEEDDDSESEAETD
KAKTLANANTTSTQSASMTAPSVAGGQGTPTSPLKKFPTSTTKVSPKEEERKDESPASWRLGLRKTGSYGALAEITASKEAQKEKDSAGVIRS
ASSPRLSSSLDNKEKEKDGKGTRLAYVAPTIPRRLASTSDIDEKENRDSSASSIRSGSSYARRKWEEDVKKNSLNEGPTSLNTSYQRSGSFGR
RQDDLVSSNVPSTASTVTSSAGLQKTLPASANTTTKSTTGSTSAGVQSSTSNRLWAEDSTEKEKDSVPTAVTVPVAPSVVNAAATTTAMTTAT
SGTVSSTSEVRERRRSYLTPVRDEESESQRKARSRQARQSRRSTQGVTLTDLQEAEKTIGRSRSTRTREQENEEKEKEEKEKQDKEKQEEKKE
SETKDDDYRQRYSRTVEEPYHRYRPTSTSTSTSSTSSLSTSTSSLSSSSQLNRPNSLIGITSAYSRSGTKESEREGGKKEEEKEEDKSQPKSI
RERRRPREKRRSTGVSFWTQDSDENEQEHQSDSEEGTNKKETQSDSLSRYDTGSLSVSSGDRYDSAQGRSGSQSYLEDRKPYCSRLEKEDSTD
FKKLYEQILAENEKLKAQLHDTNMELTDLKLQLEKTTQRQERFADRSLLEMEKRVSGKSQYLLGGKKSSRKKDI (SEQ ID NO: 100)
>sp|P26932-2|CNN1_CHICK Isoform Beta of Calponin-1 OS = Gallus gallus OX = 9031 GN = CNN1
MSNANFNRGPAYGLSAEVKNKLAQKYDPQTERQLRVWIEGATGRRIGDNFMDGLKDGVILCELINKLQPGSVQKVNDPVQNWHKLENIGNFLR
AIKHYGVKPHDIFEANDLFENTNHTQVQSTLIALASQAKTKGNNVGLGVKYAEKQQRRFQPEKLREGRNIIGLQMGTNKFASQQGMTAYGTRR
HLYDPKLGTDQPLDQATISLQMGTNKGASQGMTVYGLPRQVYDPKYCDAPGLLGEDGLNHSFYNSQ (SEQ ID NO: 101)
>tr|Q5ZKU6|Q5ZKU6_CHICK Calponin OS = Gallus gallus OX = 9031 GN = CNN2 PE = 2 SV = 1
MSSSQFNKGPSYGLSAEVKNRLAQKYDPQKEAELRTWIESVTGRQIGADFQKGLKDGVILCELMNKLQPNSVRKINRSALNWHQLENLSNFIK
AMVSYGMNPVDLFEANDLFESGNLTQVQVSLLALAGMAKTKGLQSGVDIGVKYSERQQRNFDEAKMKAGQCVIGLQMGTNKCASQSGMTAYGT
RRHLYDPKNQILPPMDHSTISLQMGTNKCASQVGMTAPGTRRHIYDAKMGLEKCDNSSMSLQMGSNQGANQSGQVFGLGRQIYDPKYCPQGTP
GDAANAAGEPGADPPGYHYYHQEESC (SEQ ID NO: 102)
>tr|E1BSX2|E1BSX2_CHICK Calponin OS = Gallus gallus OX = 9031 GN = CNN3 PE = 3 SV = 3
MTHFNKGPSYGLSAEVKNKIALKYDPQIEEDLRNWIEEVTGLSIGANFQLGLKDGIILCELINKLQPGSVKKINQSKLNWHQLENIGNFIKAI
QVYGMKPHDIFEANDLFENGNMTQVQTTLVALAGLAKTKGFHTTIDIGVKYAEKQARSFDAGKLKAGQSVIGLQMGTNKCASQAGMTAYGTRR
HLYDPKMQTDKPFDQTTISLQMGTNKGASQAGMLAPGTRRDIYDQKHILQPVDNSTISLQMGTNKVASQKGMSVYGLGRQVYDPKYCAAPTEP
VIHNGSQGTGTNGSEISDSDYQAEYPDDYHGEYQDDYQRDYHGQYSDQGIDY (SEQ ID NO: 103)
>sp|P19966|TAGL_CHICK Transgelin OS = Gallus gallus OX = 9031 GN = TAGLN PE = 1 SV = 3
MANKGPAYGMSRDVQSKIEKKYDDELEDRLVEWIVAQCGSSVGRPDRGRLGFQVWLKNGIVLSQLVNSLYPDGSKPVKIPDSPPTMVFKQMEQ
IAQFLKAAEDYGVVKTDMFQTVDLFEAKDMAAVQRTLVALGSLAVTKNDGHYHGDPNWFMKKAQEHKREFSESQLKEGKNIIGLQMGTNKGAS
QAGMSYGRPRQIIS (SEQ ID NO: 104)
>tr|A0A1L1RTM1|A0A1L1RTMl_CHICK Caldesmon OS = Gallus gallus OX = 9031 GN = CALD1 PE = 4
SV = 1
RLSYQRNDDDEEEAARERRRRARQERLRQKEEGDVSGEVTEKSEVNAQNSVAEEETKRSTDDEAALLERLARREERRQKRLQEALERQKEFDP
TITDGSLSVPSRREVNNVEENETTGKEEKVETRQGRCEIEETETVTKSYQRNNWRQDGEEEGKKEEKDSEEEKPKEVPTEENQVDVAVEKSTD
KEEVVETKTLAVNAENDTNAMLEGEQSITDAADKEKEEAEKEREKLEAEEKERLKAEEEKKAAEEKQKAEEEKKAAEERERAKAEEEKRAAEE
RERAKAEEERKAAEERERAKAEEERKAAEERAKAEEERKAAEERAKAEEERKAAEERAKAEKERKAAEERERAKAEEEKRAAEEKARLEAEKL
KEKKKMEEKKAQEEKAQANLLRKQEEDKEAKVEAKKESLPEKLQPTSKKDQVKDNKDKEKAPKEEMKSVWDRKRGVPEQKAQNGERELTTPKL
KSTENAFGRSNLKGAANAEAGSEKLKEKQQEAAVELDELKKRREERRKILEEEEQKKKQEEAERKIREEEEKKRMKEEIERRRAEAAEKRQKV
PEDGVSEEKKPFKCFSPKGSSLKIEERAEFLNKSAQKSGMKPAHTTAVVSKIDSRLEQYTSAVVGNKAAKPAKPAASDLPVPAEGVRNIKSMW
EKGNVESSPGGTGTPNKETAGLKVGVSSRINEWLTKTPEGNKSPAPKPSDLRPGDVSGKRNLWEKQSVEKPAASSSKVTATGKKSETNGLRQF
EKEP (SEQ ID NO: 105)
>tr|E1C2S1|E1C2S1_CHICK Talin-1 OS = Gallus gallus OX = 9031 GN = TLN1 PE = 4 SV = 2
MVALSLKISIGNVVKTMQFEPSTMVYDACRMIRERVPEAQMGQPNDFGLFLSDEDPKKGIWLEAGKALDYYMLRNGDTMEYKKKQRPLKIRML
DGTVKTVMVDDSKTVTDMLMTICARIGITNYDEYSLVREIMEEKKEEVTGTLKKDKTLLRDEKKMEKLKQKLHTDDELNWLDHGRTLREQGID
DNETLLLRRKFFYSDQNVDSRDPVQLNLLYVQARDDILNGSHPVSFDKACEFAGYQCQIQFGPHNEQKHKPGFLELKDFLPKEYIKQKGERKI
FMAHKNCGNMSEIEAKVRYVKLARSLKTYGVSFFLVKEKMKGKNKLVPRLLGITKECVMRVDEKTKEVIQEWSLTNIKRWAASPKSFTLDFGD
YQDGYYSVQTTEGEQIAQLIAGYIDIILKKKKSKDHFGLEGDEESTMLEDSVSPKKSTVLQQQFNRVGKAELGSVALPAIMRTGAGGPENFQV
GTMPQAQMQITSGQMHRGHMPPLTSAQQALTGTINSSMQAVNAAQATLDDFETLPPLGQDAASKAWRKNKMDESKHEIHSQVDAITAGTASVV
NLTAGDPADTDYTAVGCAVTTISSNLTEMSKGVKLLAALMEDEGGNGRQLLQAAKNLASAVSDLLKTAQPASAEPRQNLLQAAGLVGQTSGEL
LQQIGESDTDPRFQDMLMQLAKAVASAAAALVLKAKNVAQKTEDSALQTQVIAAATQCALSTSQLVACTKVVAPTISSPVCQEQLIEAGKLVA
KSAEGCVEASKAATNDDQLLKQVGVAATAVTQALNDLLQHIKQHATGGQPIGRYDQATDTILNVTENIFSSMGDAGEMVRQARILAQATSDLV
NAIKADAEGETDLENSRKLLSAAKILADATAKMVEAAKGAAAHPDSEEQQQRLREAAEGLRMATNAAAQNAIKKKLVHKLEHAAKQAAASATQ
TIAAAQHAAASNKNPAAQQQLVQSCKVVADQIPMLVQGVRGSQSQPDSPSAQLALIAASQNFLQPGGKMVAAAKATVPTITDQASAMQLSQCA
KNLAAALAELRTAAQKAQEACGPLEIDSALGLVQSLERDLKEAKAAARDGKLKPLPGETMEKCAQDLGNSTKAVTSAIAHLLGEVAQGNENYT
GIAAREVAQALRSLSQAARGVAANSSDPQVQNAMLECASDVMDKANNLIEEARKAVAKPGDPDSQQRLVQVAKAVSQALNRCVNCLPGQRDVD
AAIRMVGEASKRLLSDSFPPSNKTFQEAQSQLNRAAAGLNQSANELVQASRGTPQDLAKSSGKFGQDFNEFLQAGVEMASLSPTKEDQAQVVS
NLKSISMSSSKLLLAAKALSADPTSPNLKSQLAAAARAVTDSINQLITMCTQQAPGQKECDNALRELETVKELLENPTQTVNDMSYFSCLDSV
MENSKVLGESMAGISQNAKNSKLPEFGESISAASKALCGLTEAAAQAAYLVGVSDPNSQAGQQGLVDPTQFARANQAIQMACQNLVDPACTQS
QVLSAATIVAKHTSALCNTCRLASSRTANPVAKRQFVQSAKEVANSTANLVKTIKALDGAFNEENRERCRAATAPLIEAVDNLTAFASNPEFA
TVPAQISPEGRRAMEPIVTSAKTMLESSAGLIQTARSLAVNPKDPPQWSVLAGHSRTVSDSIKKLITNMRDKAPGQRECDEAIDVLNRCMREV
DQASLAAISQQLAPREGISQEALHNQMITAVQEINNLIEPVASAARAEASQLGHKVSQMAQYFEPLILAAIGAASKTPNHQQQMNLLDQTKTL
AESALQMLYTAKEAGGNPKQAAHTQEALEEAVQMMKEAVEDLTTTLNEAASAAGVVGGMVDSITQAINQLDEGPMGEPEGTFVDYQTTMVKTA
KAIAVTVQEMVTKSTTNPDELGILANQLTNDYGQLAQQAKPAALTAENEEIGSHIKRRVQELGHGCAALVTKAGALQCSPSDAYTKKELIESA
RKVSEKVSHVLAALQAGNRGTQACITAASAVSGIIADLDTTIMFATAGTLNRENSETFADHREGILKTAKALVEDTKVLVQNATASQEKLAQA
AQSSVSTITRLAEVVKLGAASLGSEDPETQVVLINAVKDVAKALGDLIGATKAAAGKAGDDPAVYQLKNSAKVMVTNVTSLLKTVKAVEDEAT
KGTRALEATIEHIRQELAVFSSPVPPAQVSTPEDFIRMTKGITMATAKAVAAGNSCRQEDVIATANLSRRAIADMLRACKEAAYHPEVSADVR
QRALRFGKECADGYLELLEHVLVILQKPTHELKQQLAGYSKRVASSVTELIQAAEAMKGTEWVDPEDPTVIAENELLGAAAAIEAAAKKLEQL
KPRAKPKQADESLDFEEQILEAAKSIAAATSALVKAASAAQRELVAQGKVGVIPANAVDDGQWSQGLISAARMVAAATNNLCEAANAAVQGHA
SEEKLISSAKQVAASTAQLLVACKVKADHDSEAMKRLQAAGNAVKRASDNLVKAAQKAAAFQDHDETVVVKEKMVGGIAQIIAAQEEMLRKER
ELEEARKKLAMIRQQQYKFLPTELRDEEQN (SEQ ID NO: 106)
>tr|E1EXG1|E1BXG1_CHICK Profilin OS = Gallus gallus OX = 9031 GN = PFN3 PE = 3 SV = 2
MNCWNYYTDCILSDKYIDDVAIVGLSDNKYVWAAKPGGLLSAVSPREVDLITGQDRITFLTAGISIAGKKCIVIRDSLLVEGDNVMDIRSRGG
DSRSICIGKTPKALIFLMGNRGVHGGVLNLKIHDMIAGMTL (SEQ ID NO: 107)
>tr|E1C9A2|E1C9A2_CHICK Profilin OS = Gallus gallus OX = 9031 GN = PFN4 PE = 3 SV = 2
MIQLQALLKESLIRTKHVENAAAIGINEREVCASTSGFYVPPENAINLIYAFYKNLLQVRKEGLYFRQKHYECVRADEHSIYLKNAEGGLIVV
KTNALILIATYRVGMYPSVCVEAVEKLGKTNTCTCMAACQRFIGWLCSCKELQKCV (SEQ ID NO: 108)
>sp|O93256|K1C19_CHICK Keratin, type I cytoskeletal 19 OS = Gallus gallus OX = 9031
GN = KRT19 PE = 2 SV = 1
MATYSFRQTTSSVAGGPCGRSLRLGGGSFRAPSIHGGSGGRGVSVSSARFVSSGLGSGLGGGYGGAFSSSFSAGFGGGYGGGLGSGDGLLSGN
EKTTMQNLNDRLASYLDKVRALEEANSDLETKIREWYLKQGPGPARDYSPYYKAIEDLRDQILAATIDNSKVVLQIDNARLAADDFKTKFETE
QALRMSVEADINGLRRVLDELTLARTDLELQIENLKEELAYLKKNHEEEMSALGGQVASQVSVEVDSAPGIDLSKILADMRDQYEHMAEKNRK
DAEAWFHSKTEELNRELAVNTEQLQSSKSEVTDLRRTLQGLEIELQSQLSMKGALESTLADTEGRYGAQLAQIQDMIGSIEAQLAELRADMER
QNSEYKMLMDIKTRLEQEIATYRQLLEGQESQLFGSLSGSPDKRDKPADGK (SEQ ID NO: 109)
Skeletal and cardiac muscle tissue
>tr|B5X7T1|B5X7T1_SALSA Troponin C, slow skeletal and cardiac muscles OS = Salmo salar
OX = 8030 GN = TNNC1 PE = 2 SV = 1
MDDVYKAAVENLTEEQKNEFKAAFDIACQGAEDGCISTKELGKVMRMLGQNPTPEELQEMIDEVDEDGSGTVDFDEFLVMMVRCMKEESKGKS
EEELAELFRMFDKNGDGYIDLEELKTMLESTGEAITEDDIEELMKDGDKNNDGKIDYDEFLEFMKGVE (SEQ ID NO: 110)
>sp|P09860|TNNC1_CHICK Troponin C, slow skeletal and cardiac muscles OS = Gallus gallus
OX = 9031 GN = TNNC1 PE = 1 SV = 1
MDDIYKAAVEQLTEEQKNEFKAAFDIFVLGAEDGCISTKELGKVMRMLGQNPTPEELQEMIDEVDEDGSGTVDFDEFLVMMVRCMKDDSKGKT
EEELSDLFRMFDKNADGYIDLEELKIMLQATGETITEDDIEELMKDGDKNNDGRIDYDEFLEFMKGVE (SEQ ID NO: 111)
>sp|P63315|TNNC1_BOVIN Troponin C, slow skeletal and cardiac muscles OS = Bos taurus
OX = 9913 GN = TNNC1 PE = 1 SV = 1
MDDIYKAAVEQLTEEQKNEFKAAFDIFVLGAEDGCISTKELGKVMRMLGQNPTPEELQEMIDEVDEDGSGTVDFDEFLVMMVRCMKDDSKGKS
EEELSDLFRMFDKNADGYIDLEELKIMLQATGETITEDDIEELMKDGDKNNDGRIDYDEFLEFMKGVE (SEQ ID NO: 112)
>sp|P14315-2|CAPZB_CHICK Isoform 2 of F-actin-capping protein subunit beta isoforms 1 and 2
OS = Gallus gallus OX = 9031 GN = CAPZB
MSDQQLDCALDLMRRLPPQQIEKNLSDLIDLVPSLCEDLLSSVDQPLKIARDKVVGKDYLLCDYNRDGDSYRSPWSNKYDPPLEDGAMPSARL
RKLEVEANNAFDQYRDLYFEGGVSSVYLWDLDHGFAGVILIKKAGDGSKKIKGCWDSIHVVEVQEKSSGRTAHYKLTSTVMLWLQTNKTGSGT
MNLGGSLTRQMEKDETVSDSSPHIANIGRLVEDMENKIRSTLNEIYFGKTKDIVNGLRSVQTFADKSKQEALKNDLVEALKRKQQS
(SEQ ID NO: 113)
>tr|E1EMP3|E1EMP3_BOVIN Myosin light chain kinase 3 OS = Bos taurus OX = 9913 GN = MYLK3
PE = 4 SV = 2
MSGAPKESLGPQGLPGLGKACLTTMDKKLNMLNEKVDKLLHFQEDVTEKLQCVYRGMGHLEQGLHRLEASRGLGPAGADRSPPSDAQAGWPEV
LELVRAGRQDAAQQGARLEALFRMVMAVDKAIALVGAVLQNSKVVDFIMQGSVPWRKGSLADNKEQVEEKEAKPKHTLSTRGVQAELRGPWEE
SQKADLPEGTGSDLPTQTEAPPEQRDGISGPTQVRPEVEVQAPRASSKNPGIGLELSVVSERVSEAPTGQEAALSAGRGTSPSRPDPRPSVEG
MRLTPAPPAQAKAAHGGGETPPRISIHVQETDTPGELLVTRGGSLRTSPPAETPAAVPPGEQDPPGPRCCPQAPGTESGKPILRGASVRKRSC
DEGAKAKEKQGPGSELTMAPSRARRDKGADSGASGPQQDMNPGAGNPDPGKDCTAGGVGSAEAGSRTPPGAEASSLVLDDSPAPPAPFEHRVV
SVRETSTSAGYTVCQHEVLGGGRFGQVHRCTEKATGLSLAAKIIKVKSAKDREDVKNEINIMNQLSHVNLIQLYDAFESKNSFTLVMEYVDGG
ELFDRITEEKYHLTELDVVLFTKQICEGVHYLHQHYVLHLDLKPENILCVNQTGHQIKIIDFGLARRYKPREKLKVNFGTPEFLAPEVVNYEF
VSFPTDMWSVGVITYMLLSGLSPFLGETDAETMNFIVNCNWDFDADTFEGLSEEAKDFVSRLLVKEKSCRMSATQCLKHEWLNNLPAKASKSK
VHLKSQLLLQKYMAQRKWKKHFYVVTAANRLRKFTTCP (SEQ ID NO: 114)
>tr|B5X8Q3|B5X8Q3_SALSA Troponin C OS = Salmo salar OX = 8030 GN = TNNC1 PE = 2 SV = 1
MNDIYKAAVEQLTDEQKNEFKAAFDIFVQDAEDGCISTKELGKVMRMLGQNPTPEELQEMIDEVDEDGSGTVDFDEFLVMMVRCMKDDSKGKT
EEELADLFRMFDKNADGYIDLEELKVMLEATGEAITEDDIEELMKDGDKNNDGKIDYDEFLEFMKGVE (SEQ ID NO: 115)
>tr|A4GR69|A4GR69_PIG Telethonin OS = Sus scrofa OX = 9823 GN = TCAP PE = 4 SV = 1
MATSELSCQVSEENCERREAFWAEWKDLTLSTRPEEGCSLHEEDAERRETYHQQGQCQALVQRSPWLVMRMGILGRGLQEYQLPYQRVLPLPI
FTPAKVGAAKEEREETPIQLRELLALETALGGQCLDRQDVAEITKQLPPVVPVSKPGALRRSLSRSMSQEAQRG (SEQ ID NO: 116)
>sp|P04268|TPM1_CHICK Tropomyosin alpha-1 chain
MDAIKKKMQMLKLDKENALDRAEQAEADKKAAEERSKQLEDELVALQKKLKGTEDELDKYSESLKDAQEKLELADKKATDAESEV
ASLNRRIQLVEEELDRAQERLATALQKLEEAEKAADESERGMKVIENRAQKDEEKMEIQEIQLKEAKHIAEEADRKYEEVARKLVIIEGDLER
AEERAELSESKCAELEEELKTVTNNLKSLEAQAEKYSQKEDKYEEEIKVLTDKLKEAETRAEFAERSVTKLEKSIDDLEDELYAQKLKYKAIS
EELDHALNDMTSI (SEQ ID NO: 117)
>tr|Q05706|Q05706_CHICK Beta-tropomyosin OS = Gallus gallus OX = 9031 GN = BRT-1 PE = 2
SV = 1
MEAIKKKMQMLKLDKENAIDRAEQAEADKKQAEDRCKQLEEEQQGLQKKLKGTEDEVEKYSESVKEAQEKLEQAEKKATDAEAEVASLNRRIQ
LVEEELDRAQERLATALQKLEEAEKAADESERGMKVIENRAMKDEEKMELQEMQLKEAKHIAEEADRKYEEVARKLVVLEGELERSEERAEVA
ESKCGDLEEELKIVTNNLKSLEAQADKYSTKEDKYEEEIKLLGEKLKEAETRAEFAERSVAKLEKTIDDLEERSRQEAEKNRVLTNELRVILT
ELNN (SEQ ID NO: 118)
>sp|Q2KI43|CAV3_BOVIN Caveolin-3 OS = Bos taurus OX = 9913 GN = CAV3 PE = 2 SV = 1
MMAEEHTDLEAQIVKDIHFKEIDLVNRDPKNINEDIVKVDFEDVIAEPVGTYSEDGVWKVSYTTFTVSKYWCYRLLSTLLGVPLALLWGELFA
CISFCHIWAVVPCIKSYLIEIQCISHIYSLCIRTFCNPLFAALGQVCSNIKVMLRKEV (SEQ ID NO: 119)
>sp|Q02173|MPSF_CHICK M-protein, striated muscle OS = Gallus gallus OX = 9031 PE = 2 SV = 1
MSSVAVPFYQRRHKHFDQSYRNIQTRYVLEEYAARKAASRQAAHYESTGLGKTTCRLCARRARSLAHEAMQESRKRTHEQKSHASDEKRIKFA
SELSSLEREIHMARHHAREQLDRLAIQRMVEENMALERHVVEEKISRAPEILVRLRSHTVWEKMSVRLCFTVQGFPSPVVQWYKNEELITPAS
DPAKYSVENKYGVHVLHINRADFDDSATYSAVATNIHGQASTNCAVVVRRFRESEEPHPAGIMPFHLPLSYDVCFTHFDVQFLEKFGVTFATE
GETLTLKCSVLVTPELKRLRPRAEWYRDDVLIKDSKWTKLYFGEGQAALSFTHLNKDDEGLYTLRMVTKGGVNECSAFLFVRDADALIAGAPG
APMDVKCHDANRDYVIVTWKPPNTTSQNPVIGYFVDKCEVGLENWVQCNDAPVKICKYPVTGLYEGRSYIFRVRAVNSAGISRPSRVSEPVAA
LDPVDLERTQTVHVDEGRKIVISKDDLEGDIQIPGPPTNVHASEISKTYVVLSWDPPVPRGREPLTYFIEKSMVGSGSWQRVNAQVAVKSPRY
AVFDLAEGKPYVFRVLSANKHGISDPSEITEPIQPQDIVVVPSAPGRVVATRNTKTSVVVQWDKPKHEENLYGYYIDYSVVGSNQWEPANHKP
INYNRFVVHGLETGEQYIFRVKAVNAVGFSENSQESEAIKVQAALTCPSYPHGITLLNCDGHSMTLGWKAPKYSGGSPILGYYIDKREANHKN
WHEVNSSVISRTIYTVEDLTEDAFYEFKIAAANVVGIGHPSDPSEHFKCKAWTMPEPGPAYDLTVCEVRNTSLVLLWKAPVYEGKSPITGYLV
DYKEVDTEDWITANEKPTSHRYFKVTDLHQGHTYVFKVRAVNDAGVGKSSEISEPVFVEASPGTKEIFSGVDEEGNIYLGFECKEATDASHFL
WGKSYEEIEDSDKFKIETKGDHSKLYFKHPDKSDLGTYCISVSDTDGVSSSFVLDEEELERLMTLSNEIKNPTIPLKSELAYEVLDKGEVRFW
IQAESLSPNSTYRFVINDKEVENGDRHKISCDHSNGIIEMVMDKFTIDNEGTYTVQIQDGKAKNQSSLVLIGDAFKAILAESELQRKEFLRKQ
GPHFSEFLYWEVTEECEVLLACKIANTKKETVFKWYRNGSGIDVDEAPDLQKGECHLTVPKLSRKDEGVYKATLSDDRGHDVSTLELSGKVYN
DIILALSRVSGKTASPLKILCTEEGIRLQCFLKYYNEEMKVTWSHRESKISSGEKMKIGGGEDVAWLQITEPTEKDKGNYTFEIFSDKESFKR
TLDLSGQAFDDALTEFQRLKAAAFAEKNRGKVIGGLPDVVTIMDGKTLNLTCTVFGNPDPEVVWFKNDKALELNEHYLVSLEQGKYASLTIKG
VTSEDSGKYSIYVKNKYGGETVDVTVSVYRHGEKIPEVNQGQLAKPRLIPPSSST (SEQ ID NO: 120)
>tr|E1BE25|E1BE25_BOVIN Filamin C OS = Bos taurus OX = 9913 GN = FLNC PE = 1 SV = 1
MMNNSGYSEAPGFGLGDEVDDMPSTEKDLAEDAPWKKIQQNTFTRWCNEHLKCVGKRLTDLQRDLSDGLRLIALLEVLSQKRMYR
KFHPRPNFRQMKLENVSVALEFLEREHIKLVSIDSKAIVDGNLKLILGLIWTLILHYSISMPMWEDEDDEDARKQTPKQRLLGWIQNKVPQLP
ITNFNRDWQDGKALGALVDNCAPGLCPDWEAWDPNQPVENAREAMQQADDWLGVPQVIAPEEIVDPNVDEHSVMTYLSQFPKAKLKPGAPVRS
KQLNPKKAIAYGPGIEPQGNTVLQPAHFTVQTVDAGIGEVLVYIEDPEGHTEEAKVVPNNDKNRTYAVSYVPKVAGLHKVTVLFAGQNIERSP
FEVNVGMALGDANKVSARGPGLEPVGNVANKPTYFDIYTAGAGTGDVAVVIVDPQGRRDTVEVALEDKGDSTFRCTYRPVMEGPHTVHVAFAG
APITRSPFPVHVAEACNPNACRASGRGLQPKGVRVKEVADFKVFTKGAGSGELKVTVKGPRGTEEPVKVREAGDGVFECEYYPVVPGKYVVTI
TWGGYAIPRSPFEVQVSPEAGIQKVRAWGPGLETGQVGKSADFVVEAIGTEVGTLGFSIEGPSQAKIECDDKGDGSCDVRYWPTEPGEYAVHV
ICDDEDIRDSPFIAHIQPAPPDCFPDKVKAFGPGLEPTGCIVDKPAEFTIDARAAGKGDLKLYAQDADGCPIDIKVIPNGDGTFRCSYVPTKP
IKHTIIVSWGGVNVPKSPFRVNVGEGSHPERVKVYGPGVEKTGLKANEPTYFTVDCSEAGQGDVSIGIKCAPGVVGPAEADIDFDIIKNDNDT
FTVKYTPPGAGRYTIMVLFANQEIPASPFHIKVDPSHDASKVKAEGPGLNRTGVEVGKPTHFTVLTKGAGKAKLDVHFAGAAKGEAVRDFEII
DNHDYSYTVKYTAVQQGNMAVTVTYGGDPVPKSPFVVNVAPPLDLSKVKVQGLNSKVAVGQEQAFSVNTRGAGGQGQLDVRMTSPSRRPIPCK
LEPGGGAETQAVRYMPPEEGPYKVDITYDGHPVPGSPFAVEGVLPPDPSKVCAYGPGLKGGLVGTPAPFSIDTKGAGTGGLGLTVEGPCEAKI
ECQDNGDGSCAVSYLPTEPGEYTINILFAEAHIPGSPFKATIRPVFDPSKVRASGPGLERGKAGEAATFTVDCSEAGEAELTIEILSDAGVKA
EVLIHNNADGTYHITYSPAFPGTYTITIKYGGHPVPKFPTRVHVQPAVDTSGVKVSGPGVEPHGVLREVTTEFTVDARSLTATGGNHVTARVL
NPSGAKTDTYVTDNGDGTYRVQYTAYEEGAHLVEVLYDDVAVPKSPFRVGVTEGCDPTRVRAFGPGLEGGLVNKANRFTVETRGAGTGGLGLA
IEGPSEAKMSCKDNKDGSCTVEYIPFTPGDYDVNITFGGRPIPGSPFRVPVKDVVDPGKVKCSGPGLGAGVRARVPQTFTVDCSQAGRAPLQV
AVLGPTGVAEPVEVRDNGDGTHTVHYTPATDGPYTVAVKYADQEVPRSLSSPFKIKVLPAHDASKVRASGPGLNASGIPASLPVEFTIDARDA
GEGLLTVQILDPEGKPKKANIRDNGDGTYTVSYLPDMSGRYTITIKYGGDEIPYSPFRIHALPTGDASKCLVTVSIGGHGLGACLGPRIQIGE
ETVITVDAKAAGKGKVTCTVSTPDGAELDVDVVENHDGTFDIYYTAPEPGKYVITIRFGGEHIPNSPFHVLACEAMPRVEEPPDVPQLHRPSA
YPTHWATEEPVVPAEPMESMLRPFNLVIPFTVQKGELTGEVRMPSGKTARPNITDNKDGTITVRYAPTEKGLHQMGIKYDGNHIPGSPLQFYV
DAINSRHVSAYGPGLSHGMVNKPATFTIVTKDAGEGGLSLAVEGPSKAEITCKDNKDGTCTVSYLPTAPGDYSIIVRFDDKHIPGSPFTAKIT
GDDSMRTSQLNVGTSTDVSLKITESDLSQLTASIRAPSGNEEPCLLKRLPNRHIGISFTPKEVGEHVVSVRKSGKHVTNSPFKILVGPSEIGD
ASKVRVWGKGLSEGHTFQVAEFIVDTRNAGYGGLGLSIEGPSKVDINCEDMEDGTCKVTYCPTEPGTYIINIKFADKHVPGSPFTVKVTGEGR
MKESITRRRQAPSIATIGSTCDLNLKIPGNWFQMVSAQERLTRTFTRSSHTYTRTERTEISKTRGGETKREVRVEESTQVGGDPFPAVFGDFL
GRERLGSFGSITRQQEGEASSQDMTAQVTSPSGKTEAAEIVEGEDSAYSVRFVPQEMGPHTVTVKYRGQHVPGSPFQFTVGPLGEGGAHKVRA
GGTGLERGVAGVPAEFSIWTREAGAGGLSIAVEGPSKAEIAFEDRKDGSCGVSYVVQEPGDYEVSIKFNDEHIPDSPFVVPVASLSDDARRLT
VTSLQETGLKVNQPASFAVQLNGARGVIDARVHTPSGAVEECYVSELDSDKHTIRFIPHENGVHSIDVKFNGAHIPGSPFKIRVGEQSQAGDP
GLVSAYGPGLEGGTTGVSSEFIVNTLNAGSGALSVTIDGPSKVQLDCRECPEGHVVTYTPMAPGNYLIAIKYGGPQHIVGSPFKAKVTGPRLS
GGHSLHETSTVLVETVTKSSSSRGSSYSSIPKFSSDASKVVTRGPGLSQAFVGQKNSFTVDCSKAGTNMMMVGVHGPKTPCEEVYVKHMGNRV
YNVTYTVKEKGDYILIVKWGDESVPGSPFKVNVP (SEQ ID NO: 121)
>tr|Q5ZLY3|Q5ZLY3_CHICK Tropomodulin 3 OS = Gallus gallus OX = 9031 GN = TMOD3 PE = 2 SV = 1
MTLPFRKDLDKYKDLDEDDILGKLSEEELKQLETVLDDLDPENALLPAGFRQKDQTAKKASGPFDRERLLAYLEKQALEHKDREDYVPFTKEK
KGKVFIPKQKPAQSYAEEKIALDPELEEALTSATDTELCDLAAILGMSNLITNNQFCDIVGSSNGVGKDSFSNIVKGEKMLPVFDEPPNPTNV
EETLQRIKDNDSRLVEVNLNNIKNIPIPTLKEFAKALETNTHVKNFSLAATRSNDPVAVALADMLRVNTKLKSLNIESNFITGVGILALVDAL
KDNETLTEIKIDNQRQQLGTLAEVEIAKMLEENTKILKEGYHFTQQGPRARAAAAITKNNDLVRKRRVEGDGQ (SEQ ID NO: 122)
>AAC14459.1 tropomodulin [Gallus gallus]
MSYRKELEKYRDLDEDKILGALTEEELRKLENELEELDPDNALLPAGLRQRDQTQKPPTGPFKREELMAHLEQQAKDIKDREDLVPFTGEKRG
KAWIPKQKPMDPVLESVTLEPELEEALANASDAELCDIAAILGMHTLMSNQQYYEALGSSTIVNKEGLNSVIKPTKYKPVPDEEPNSTDVEET
LKRIQNNDPDLEEVNLNNIMNIPVPTLKALAEALKTNTYVKKFSIVGTRSNDPVAFALAEMLKVNNTLKSLNVESNFISGSGILALVEALQSN
TSLIELRIDNQSQPLGNNVEMEIANMLEKNTTLLKFGYHFTQQGPRLRASNAMMNNNDLVRKRRLAELNGPIFPKCRTGV
(SEQ ID NO: 123)
>tr|A0A28713J41|A0A28713J41_PIG Tropomodulin 1 OS = Sus scrofa OX = 9823 GN = TMOD1 PE = 1
SV = 1
MSYRRELEKYRDLDEDEILGALTEEELRTLENELDELDPDNALLPAGLRQKDQTTKAPTGPFKREELLDHLEKQAKEFKDREDLVPYTGEKRG
KVWVPKQKPMDPVLETVTLEPELEEALANASDAELCDIAAILGMHTLMSNQQYYQALGSSSIVNKEGLNSVIKPTQYKPVPDEEPNATDVEET
LERIKNNDPKLEEVNLNNIRNIPIPTLKAYAEALKENSYVKKFSIVGTRSNDPVAFALAEMLKVNKVLKTLNVESNFISGAGILRLVEALPYN
TSLVELKIDNQSQPLGNKVEMEIVSMLEKNATLLKEGYHFTQQGPRLRASNAMMNNNDLVRKRRLADLTGPIIPKCRSGI
(SEQ ID NO: 124)
>tr|F1NXA5|F1NXA5_CHICK Coronin OS = Gallus gallus OX = 9031 GN = CORO6 PE = 3 SV = 3
MSRRVVRQSKFRHVFGQPVKADQMYEDIRVSKVTWDSSFCAVNPKFVAIIVEAGGGGAFMVLPLAKTGRVDKNHPLVTGHTAPVLDIDWCPHN
DNVIASASEDTTVMVWQIPDYVPVRSITEPVVTLEGHSKRVGIICWHPTARNVLLSAGCDNLVILWNVGTGEMLLALEDMHTDLIYNVGWNRN
GSLLVTTCKDKKVRVIDPRKQTVVAEITKPHDGARPIRAIFMADGKIFTTGFSKMSERQLGLWDLKNFEEPIALQEMDTSNGVLLPFYDPDTN
IVYLCGKGDSSIRYFEITDEAPYVHYLNTYSSKEPQRGMGFMPKRGLDVSKCEIARFFKLHERKCEPIVMTVPRKSDLFQDDLYPDTPGPEPA
LEADEWLSGKDAEPILISLRDGYVPVKNRELKVVKKNILDSKPPPGPRRSHSTSNTDISTPALDEVLEEIRVLKETVQAQEKRISALEHKLCQ
FTNGTD (SEQ ID NO: 125)
>XP_015136760.1 nebulette isoform X1 [Gallus gallus]
MYFSFMLAGLHRRKEFSLLFPPSIKMRVSVTQEFTEDENENGEEERVFLKPVIEDRNMELARKCSEIISDVHYKEEFEKSKGKCIFVPDTPQL
KHVKSVGAFISEVKYKGAAKKDLSNSLYQQMPATIDSAFAKELTQLQSKVLYKQKHDAEKGTSDYAHMKEPPDIKHAMEVNKYQSDVSYKRDV
QDTHRYTEVLNRPDIKMATEITKIISDAEYKKGRGEMNKEPAVLGRPDFEHAKGVSKLLSQVKYKEQFKKEMKSHQYNPLDSASFKQAQIAST
LASNVNYKKDYKESLHDPASDLPNLLYLNHALNISKMHSDVKYRENYEKSKGKSMLEFVDTPLYQVSKDVQKMQSEKIYRKDFEESLKGRPSL
DLDKTPEFLHIKQVTNLLKEKEYRKDLEEWMKGKGMTVFEDTPDLIRVKNAAQILNEKQYKKDLETEIKGKGMQVGPDTPEIRRAKKASEIAS
TKEYKKDLENEIKGKGMEVGMDTPDIQRAKKASEIVSQKEYRKDLETEIIGKGMQVGPFTPEIQRVKRASEIASQKMYKDEAEKMLCNYSAVP
DTPEMERIKSTQKNISSVFYKKVVGAGTAVKETPEIERVKKNQQNISSIKYKEETQHATPISDPPELRRIKENQKNISNVHYKEQLCRATPVS
VTPEIERVKRNQENVSMVHYREQPGKATAVSITPEIERVKKNQDNISSVKYSSDQRQMKGRRSVILDTPELRHVKETQNNISMVKYHEDFEKT
KGRGFTPVVDDPITERVRKNTQVVSDAAYKGVHPHIVEMDRRPGIIVDLKVWRTDPGSIFDIDPLEDNIQSRSLHMLSERASRYSKQYLHSTS
LGDYKSDGSDTNPTFSYCSEITRPSDEGAPVLPGAYQQSQSQGYGYMHQTSMSSMRSVHSQPHPAGLRTYRAMYDYSAQDEDEVSFRDGDYII
NVQPIDDGWMYGTVQRTGKTGMLPANYIEFVN (SEQ ID NO: 126)
>tr|F1MMX2|F1MMX2_BOVIN Nebulin-related-anchoring protein OS = Bos taurus OX = 9913
GN = NRAP PE = 4 SV = 1
MNVQACSRCGYGVYPAEKINCLDQIWHKACFHCEVCKMMLSVNNFVSYQKKPYCHAENPKNNTFTSVYYTPLNLNVRKPPEAICGIGGQEDGE
RFKSVFHWDMKSKDEAAAPNRQPQVDERAYWSGYREGDAWCPGALPDPEIVRMVEARKSLGEEYPEDYEQQRGKGSFPAMITPAYQRAKIANQ
LASQVEYKRGHDERISRFSTVADTPELLRAKAGGQLQSDVRYTEAYEQQRGKGSFPAMITPAYQIAKRANELASDVRYHQQYQREMKGMAGPA
AGAEGPLPKEYMDQYGQGYSEEYGEHRGKGSFPAMITPAYQNAKKANELASDIKYRQDFNKMKGAAHYHSLPAQDNLVLKRAQSVNKLVSEVE
YKKDLESSKGHSINYCETPQFRNVCKISKFTSDNKYKENYQNRMRGRYEGVGMDKRMLHALKVGSLASNIAYKADYKHDVVDYNYPATLTPSY
QTTVKLAPLKDVNYRQSIDKLKYSSVTNTPQIVQAKINAQQLSHVNYRADYEKNKLNYTLPQDVPQLVKARTNAELFSEVKYREGWEKTKGKG
FEMKLDAMSLLAAKASGELASNIKYKEEYEKAKGKVLGTTDSRLLHSLQVAKMSSEVEYKKGFEKSKTHFHLPMDMVNIRHAKKAQALASDLD
YRKRLHEYTVLPEDMKTLWAKKAYGLQSELQYKADLAWMKGVRWLTEGSLNLEQAKKAGQLVSEKNYRQRVDELKFTSVADSSQMEHAKKSQE
LQSGVAYKAEHEQSVHQYSISKDEPLFLQARANAANLSEKLYKSSWENQKAKAFDLRLDSLAFLAAKAKRDLASEVKYKEDYEKSRGKLIGAQ
GAQGDSQMSHSLQMSKLQSELEYKKGFEDTKSQCHVPLDMIHLVHARKAQHLATDIGYKTASHHFTALPTDMKVEWAKKAYGLQSDNQYRADV
KWMKGTGWVATGSLNVEQAKKAGELISEKKYRQHPDALKFTSIKDTPEMVQARISYTQAVDRLYREQGENLKHHYTQTTDLPEVLLAKLNAMN
ISETRYKESWSKLRDGGYKLRLDAIPFQAAKASGEIISDYKYKEAFEKMKGQMLGSRSLEDDISLAHSVYASSLQSQVNYKKDFEHSKAQFHL
PLDMVTLVHAKKAQTLASDQDYRHPLPQYTSLAEDLRLSCAKRAHKLQSENLYRSDLNFMRGVACVIPGTLEIEGRKRASELISESKYRQHPQ
SLKYTAVTDTPSLTHAKLSNQITNERLYKAAGEDARHQYTMTLGLPEFVRAKTNAANLSDAKYKESWRNLHAQGYKLTIDALPFQAARVSGDI
ASDFLYRHDFVKERGRLIGAQSVSDDPRLQHCQRVGQLQSELQYRRQAAGSRAQCHLPMDMVPLVHARKAQALASDLDYRTQCHAFTALPEDL
RMAWAKKAHALQSELRYKSDLMGMKGTGWLALSSPQIESAKKAGELISETKYREKPDTIKFTTVVDSPDLVHAKNSYMHCNERLYRSGDAESR
HRYTLVPDHPDFTRARLNALNLSDKVYRHSWEQTRAGGYDFRLDAIPFQTARASREIASDFRYKEAFLRDRGLQIGYRSINDDPRTKHFLSVG
RLQSDNEYKKDFAKSRSQFHSRPDQPGFLQAKRSQQLASDVHYRQPLPQPTCDPEQLGLKHAQKAHRLQSDVKYKSDLNLTRGIGWTPPGSYK
VEMARRAAELANARGLGLQGAYGGPEAVEPRDDQSGFVNPDATEILHVKRRKAPLF (SEQ ID NO: 127)
>XP_003641574.1 nebulin-related-anchoring protein isoform X1 [Gallus gallus]
MNVQPCARCGYGVYPAEKINCIDQTWHKACFHCEVCKMMLTVNNFVSHEKKPYCQVHNPKNNAFTSIFETPINLNAKKLSEVVSEVKYREESE
QFKSAFQWDVRSRDIEAAYKAQHLSSQNAYYAAYEGGTSWYSGNMPDPQMVTVTQAQKNLNDLQYTEEYELRQGKGSFPAMITPGYQVAKRAT
QLSSNVEYRRGHEERVSKFTSVVDTPDILHAKAGGQLASDLKYTEDFEEQRGKGSFPAMITPAYQIAKRANELASDVKYHQTYEKEIKGKASH
TAGTDVTFTRENVDQYGQDYMNEYEERRGKGSFPAMITPAYQNAKKANELASDIKYKKDLSKMKGAAHFHSLTAEDNLVLKQAQSANKLVSEV
EYKKDLGNNRGYSVNYCDTPQFKNVSKISKYTSDIKYKETYQNQMKGHYMGIGMDKRMLHAMKVGNLASNIAYKSDYKHDGVDYNYPATLTPS
YQTTRKLVPLKDVNYRQSIDKMKYSSVASTPEIAQAKINAQQLSDLNYRAQYEKTKTNYTLPQDIPQLVKAKANAELYSEVKYKEGWEKSKGQ
GFEMKLDSLPLLAAKASRDLASDIKYKEEYEKTKGKAIETKDSRLLHSLQVAKMSSEIAYKKDFEESKTHFHLPMDMVNLRHAKKAQALASDL
DYRKRLHEYTVVPEDLKTKWAKKAYGLQSDLQYREDLMWMKGVGCITEGSLNIQQAKKAGDLVSEKKYRQKVDALKFTSVADSSHIKHAKKSQ
ELQSDVAYRSGKEQFLHQYTITKDDPVFLLAKANAANISEKLYRSSWEKQKEKGFVLRLDALSFLTAKAKRDLASDIKYKEGYEKMKGKLIGV
KAVEEDSKMAHSLQMSKLQSDLEYKKAFEDTKNQFQVSMDMANLVHAKKAQNLASDKGYRTALHHYTVLPTDRKVAWAKWAYGLQSDNRYRAD
LNWMKGAGWIATGSLNVEQAKKAGELISEKKYRQHPYALKFTSIKDTPEMIQARISYNQAVDRLYKEHGESIKHQYTLTADLPEILRAKLNTM
NISEIRYKESWQKMKDGGYQLRLDAIPFQAAKASGEIISDHKYKEAFEKMKGQMIGSCGLDGDIRIAHSVHASSLQSDVKYKQGFEDTKTHFH
LPLDMINLVHARKAQSLVSEQEYRQLLHQYTSLTDDLRLQCAKNAYKLQSENLYRSDMNFMRGVGCITPGALEIEGKKKASELISESKYRQQP
HSFKYTSVTDSPGLLHAKFSNMIANERLYKAAGEDIQHHYTPTLGLPEFTQARINAANLSDVKYRESWHNLCAQGYKLTMEALPFQTARASRE
IASDYQYKHNFVMERGKHIGARSVLDDTRLLHCLHAAKLQSEQEYKKGSQGVWSQYYLPMDMVNLVHARKAQALASDQEYRKRLHEFTALPED
LKMKWAKRAHMLQSEHRYKSDLNFMKGVGWMALRSPQIESVKKAGELISETKYRQKPESLKFTAVVDSPDLIHAKNSYLQCNDRLYKAGDSEA
RHRYTLPPDHPDFIRARQNALNISDKVYKTSWEQTRASGYDFRIDAIPFQTAKASREIASDYKYREAFLRDRGQRIGFFSANDDAHTRHVLRV
GKLQSDNLYRSGYAQNRGHFQSHLNQPGFLHAKRSQQLASNVNYKQPLHQYTCDPEQLNVKHAKQAYKLQSDVKYKSDLNWLRGIGWTPPGSY
KVERARRAAELAYLREMGLQAASAQYGPEADQVGPEGSQQVTVNPDASEILQVKRRKMQLYK (SEQ ID NO: 128)
>sp|P08728|K1C19_BOVIN Keratin, type I cytoskeletal 19 OS = Bos taurus OX = 9913 GN = KRT19
PE = 2 SV = 1
MTSYSYRQSSSTSSFGGMGGGSMRFGAGGAFRAPSIHGGSGGRGVSVSSARFVSSSSGGYGGGYGGALATSDGLLAGNEKLTMQNLNDRLASY
LEKVRALEEANGDLEVKIRDWYQKQGPGPARDYSHYFKTIEDLRDQILGATIENSKIVLQIDNARLAADDFRTKFETEQALRMSVEADINGLR
RVLDELTLARTDLEMQIEGLKEELAYLKKNHEEEMSVLKGQVGGQVSVEVDSAPGIDLAKILSDMRSQYEVIAEKNRKDAEAWFISQTEELNR
EVAGHTEQLQISKTEVTDLRRTLQGLEIELQSQLSMKAALEGTLAETEARFGAQLAQIQALISGIEAQLSDVRADTERQNQEYQHLMDIKTRL
EQEIATYRNLLEGQDAYFNDLSLAKAL (SEQ ID NO: 129)
>tr|E1BF23|E1BF23_BOVIN Myomesin 2 OS = Bos taurus OX = 9913 GN = MYOM2 PE = 4 SV = 2
MSLVAVPFYQKRHKHFDQSYRNIQTRYLLDEYSAKKKRASAQSSLQRSVTRKSSSQRESSRAALGRTTCRLCAKRMSSALEEEAQERKRRYQS
MVAAYGEAKRERYLSELAQLEEDVHVARTHARDQLDRLALQHAVDDRLAWERHSFEERISRAPEILVRLRSHTVWERMSVKLCFTVQGFPTPV
VQWYKDGSLICQAGEPGKYRIDSKYGVHTLEINRADFDDTATYSAVATNVHGQVSTNAAVVVRRFRGDEEPFHSVGLPIGLPLSSVIPYTHFD
VQFIEKFGVTFRREGETLTLKCTLLVTPDLKRVQPRAEWYRDDVLLKESKWTKMFFGEGQASLSFSHLNKDDEGLYTLRIVSRGGITDHSAFL
FVRDADPLVTGAPGAPMDVHCHDVNRDYVIVTWKPPNATKESPVIGYFIDRCEVGTDNWIQCNDAPVKICKYPVTGLFEGRSYIFRVRAVNSA
GISRPSRVSEAVAALDPVDLRRLQAVHLEGEKDIVVYQEELEGEVQIPGPPTNVHASETSRTYVVLSWDPPEPRGKEPLMYFIEKSMVGSGSW
QRVNAQTAVRSPRYAVFDLAEGKPYVFRVLSANKHGLSDPSEITAPIQAQDTIVVPSAPGRVLASRNTRTSVVVQWDRPKHEEDLLGYYVDCS
VAGSNVWEPCNHKPIGYNRFVVHGLTTGEQYIFRVKAVNAVGTSENSQESDVIKVQAALTVPSHPYGITLLNCDGHSMILGWKVPKFSGGSPI
LGYYVDKREAHHKNWHEVNSSPLKERILTVEGLTEGSLYEFKIAAANMAGIGQPSDPSELFKCEAWTMPEPGPAYDLTFCEVRDTSLVLLWKP
PVYSGSSPVSGYFVDYKEEDSGEWLTVHETATPHRYLKVCDLHQGKTYVFRVRAVNASGVGRPSDTSEPVLVEARPGTKEVSAGVDEEGNVYL
SFDCPEVTDASHFTWCKSYEDIADDDRFKVETAGDHSKLYFKNLDKEDLGTYSVSVSDTDGVSSSFVLDEEELERLKALSNEIKNPTIPLKSE
LAYEIFDKGQVRFWLQAEHLSPDSSYRFIINDREVADSETHRIKCDKSTGIIEMVMDRFTIDNEGTYTVQIQDGKAKSQSSLVLIGDAFKAVL
KEAEFQRKEFLRKQGPHFAEYLHWDVTEECEVRLVCKVANTKKETVFKWLKDDVLYETEKMPDLEKGVCELLIPKLSKKDHGEYKATLKDDRG
QDVSTLEIAGKVYEDMILAMSRVCGASASPLKILCTPEGIRLQCFMKYFTEEMKVNWYHKDAKITSSEHMRIGGNEQMAWLQICEPTEKDKGK
YTFEILDGKKNHQRSLDLSGQAFDEAFAEFQQLKAAAFAEKNRGKVIGGLPDVVTIMEGKTLNLTCTVFGNPDPEVVWFKNDKDIELSDHFSV
KVEQGKYVSMTIKGVTSEDSGKYSIHVKNKYGGEKIDVTVSVYKHGEEIPDVVLPQQAKPKLLPAAAPSPAH (SEQ ID NO: 130)
>tr|F1N0L9|F1N0L9_BOVIN Myopalladin OS = Bos taurus OX = 9913 GN = MYPN PE = 4 SV = 2
MQDDSLEASTSISQLLRESYLAETRHRGNNERSRAEPSSNPFHFGGSSGAAEGGGGQDDLPDLSAFLSQEELDESVNLARLAINYDPLEKADE
AQARKRFSSDQTKHSSISSFDPNFCQDNSQSPTNSKESLQETKRPQYSSEAQSKKVFLNKAADFIEELSSLFKAHSSKRIRPRACKNHKSKLE
SQNQVMQENSSSFPDLSERRERSSVPIPIPADTRDNEVNHALEQQEAKRREAEQAAGEAASGDTTPGSSPSSLYYEEPLGQPPRFTQKLRSRE
VPEGTRVQLDCIVVGIPPPQVRWYCEGKELENSPDIHIIQAGNLHSLTIAEAFEEDTGRYSCFASNIYGTDSTSAEIYIEGVSSSDSEGDPNK
DEMNRIQKPNEVSSPPTTSAGIPSAVPQTQHVVVQPRVSTIQQCQSPTNYLQGLDGKPIIAAPVFTKMLQNLSASEGQLVVFECRVKGAPSPK
VEWYREGTLIEDSPDFRILQKKPRSMAEPEEICTLVIAEVFAEDSGCFTCTASNKYGTVSSIAQLDVRGNEDLRNNGSLHSANSTTNLALTEQ
QPSPPNPEPPVEQPPKPKLEGVLVNHNEPRSSSRIGLRVHFNLPEDDKGSEESSEGGVVTTHQTRPDSFQERFNGQSAKISEPSSPVKEPPPV
LAKPKLDSSQLQQLHNQVLLEQHHLQNPSPSSPKEFPFNMSVLNSTTVPAVTVSSKHAKAPPSQTFSLARPKHFFPSTSTTVASVSPSSSPVF
TLSSTPQAMQRTMSKESLLVTHPSAQTKSLGGASIQNEPLPTPAPTEPAQLPLTFSISSGNQFQPRCVSPAPVSPTGRIQNPVAFLSSVLPSL
PAIPPTNAMGLPKSAPSMPSQGLMKKNTKSSHPVSDDYIRETKNAVILDLGKKMNFSDVRSNQQEYKISSFEQRLMNEIEFRLERTPVDESDD
EIQHDEIPTGKCIAPIFDKRLKHFRVTEGSPVTFTCKIVGIPVPKVYWFKDGKQISKRNEHFKMKREGDGTCSLHINSTSSDDDGNYTIMAAN
PQGRISCSGHLMVQGLPIRSRLTAAGQSHRGRSRVQERDKEPLQERFFRPHFLQAPGDMVAHEGRLCRLDCKVSGLPPPELTWLLNGQPVLPD
TSHKMLVRETGVHSLLIDPLTQRDAGTYTCIATNKTGQNSFSLELTVVAKEVKKAPVILEKLQNSGVPEGHPVRLECRVIGMPPPVFYWKKDN
ETIPFTRERISMHQDTTGYVCLLIQPAKKSDAGWYTLSAKNEAGIVSCTARLDIYAQWHHQIPPPMTVRPSGSRYGSLTSKGLDIFSAFSSME
STMVYSCSSRSVVESDEL (SEQ ID NO: 131)
>sp|Q5E9V3|MYOZ2_BOVIN Myozenin-2 OS = Bos taurus OX = 9913 GN = MYOZ2 PE = 2 SV = 1
MLSHNTMVKQRKQQASAIMKEIHGNDVDVMHLGKKVSIPRDIMLEELSHLSNRGARLFKMRQRRSDKYTFENFQYETKAQINHNIAMQNEKLD
GINLESGSQQAPFTPPNTPDPRSPPNPENIAPGYSGPLKEIPPERFNTTAVPKYYQSPWEQAISNDPELLEALYPKFFKPEGKAELPDYRSFN
RVATPFGGFEKASKMVKFKVPDFDLLLLTDPRFMAFANPLSGRRSFNRTPKGWISENIPIVITTEPTEDNTIPESEDL
(SEQ ID NO: 132)
>tr|A0A1L1RJB3|A0A1L1RJB3_CHICK Uncharacterized protein OS = Gallus gallus OX = 9031
GN = MYOZ2 PE = 4 SV = 1
MLSHSAMVKERKQQASAIMDEIQRNVSPSLNLGKKVSTPRDIMVEELSTLSNRGARLFKRRQRRSDKYTYENYHYVANKPRNRGEPIHSVKMD
GLSVEGIPQHAPMTPPNTPDPRSPPHPDNIAPGYSGPLKEIPPEKFNTTSVPKYYQSPWIEAIRDDPELLEALYPKLFKPEAKPELPDYRSFN
RVATPFGGFERASKLVKFKVPDYNLLMLNDPRFMILANPLATRRSFNRTPKGWTSENIPVVFIQPSDSNNVPETEDL
(SEQ ID NO: 133)
>tr|Q1AG08|Q1AG08_PIG Calsarcin 1 OS = Sus scrofa OX = 9823 GN = MYOZ2 PE = 2 SV = 1
MLSHNTMVKQRKQQASAIMKEIHGNDVDGMDLGKKVSIPRDIMLEELSHLSNRGARLFKMRQRRSDKYTFENFQYESKAQINENIAMQNGKLD
GNNLESGSQQAPFTPPNTPDPRSPPNPENIAPGYSGPLKEIPPERFNTTAVPKYYQSPWEQAISNDPELLEALYPKLFKPEGKAELPDYRSFN
RVATPFGGFEKASKIVKFKVPDFELLLLTDPRFMAFANPLSGRRSFNRTPKGWISENIPIVITTEPTEDTTIPESDDL
(SEQ ID NO: 134)
>tr|A8E4L9|A8E4L9_BOVIN SYNC protein OS = Bos taurus OX = 9913 GN = SYNC PE = 2 SV = 1
MASPEPRRGGNGSAQAARATRPEVISPLQEENSASLYELGTWNPEVTLSLEGTLNLEDILYLGDTGDLDEALYVEETEPPEETLHIEETRMPD
EALYLEEPVRPEAALYVEEPVKLEGVLYVEEPVKTASPEQIVHGGDRVLSEAKSKPKESLQAGPSPSTEGSLSIEDLELLEGRFQQCIEAVAQ
LEEERDQLIHELVLLREPALQEVQQVHRDILAAYKQHAQAELERDGLREEIRLVKQKLFKVTKECVAYQYQLECRRQDVAQFADFREALTTRA
AQLSEELTQLREAYQKQKEQLRQQLEAPQSQRDGHFLQESRRLSAQFESLMAESRQGLEEEYEPQLLRLLERKEAAAKALQKTQAEIQEMKEA
LRPLQAEAQKLHLQNRNLEDQITLVRQKRDEEVQQYREQLEEMEERQRQLRSGVQLQQQKNKEMEQLRVSLAEELATYKAMLPKSLEQANAPT
SEAGGIETPSQGAV (SEQ ID NO: 135)
>tr|F1NM11|F1NM11_CHICK Syncoilin, intermediate filament protein OS = Gallus gallus OX = 9031
GN = SYNC PE = 4 SV = 4
MDAEGAGTPQAPEGTERPCLSLEELGEYFQECIEAVEQLEKERDALIEELTQLREPALQDIRHAHQEIQAACRLLAKVELERDNLRDEIRQIK
QKLFKVTKECVACQYQLESRRHDLSQHAAYRDELESQAGRLTGELSRLRESCEKEKEALRQRLEAPPCRQDPQYLQESRRLSAEFESLVTRSR
RGLEEHYEPQLLRLLERREAGTRALQELQGEVQGMKEALRPLQGEVSRLRLQNRSLEEQIVLVKQKRDEEVGQYREQVEELEDRLKELKNSVQ
LQQRKNQELEELRSSLHHELSIYKGCLEIYGHLCKSEEKPDQEC (SEQ ID NO: 136)
>tr|A0A287BKP7|A0A287BKP7_PIG Syncoilin, intermediate filament protein OS = Sus scrofa
OX = 9823 GN = SYNC PE = 3 SV = 1
MASPEPRRGGDGAAQAARETRAEATSPLQEGNSESLYQLGTWNPEVTLSLEGTLNLEDILYLGDPVDLDEALYVEETEKPEETLHIEETRLPD
EALYVEEPVKPEEMLYVEETVKPEEIVCVEQTMKPGETTSPEPITYGGETVPSEEKPNPEESLRAKPNPSTDGSLSLEDLELLEGRFQQCVQA
VAQLEEERDQLIHELVLLREPALQEVQQVHQDILAAYKLHAQAELERDGLREEIRLVKQKLFKVTKECVAYQYQLECRRQDVAQFADFREVLT
ARAAQLSEELAQLRDAYQKQKEQLRQQLEAPPSQRDGHFLQESRRLSARFENLMAESRQGLEEEYEPQLLRLLERKEAAAKALQKTQAEIQEM
KEALRPLQAEARQLHLQNRNLEDQITLVRQKRDEEVQQYREQLEEMEERQRQLKSGVQLQQQKNKEMEQLRISLAEELSTYKAMLPKSLERAS
APTSEAGGIETQSQGAV (SEQ ID NO: 137)
>tr|A4FV66|A4FV66_BOVIN Sarcoglycan alpha OS = Bos taurus OX = 9913 GN = SGCA PE = 2 SV = 1
MAAALIWISLLVGLLEGLGGTEAQQTTLHPLVGRVFVHTLDHESFLQRPEHVFSVSAPIPITYHAHLQGHPDLPRWLRYTQRSPYQPGFLYGT
ATPEDRGHQIIEVTAYNRDSFNTTQQMLVLLIGDPEGPLLPYQAEFLVRSHDVEEVLPSIPASRFLTALGGLWEPAELQLVNITSALDRGGRV
PLPIEGRKEGVYIKVGSASPFSTCLKMVVSPDSHARCAQGQPPLLSCYDTLAPHFRVDWCNVSLVDKSVPEPADEAPAPGDGILEHDPFFCPP
TEATNRDFLTDALVTLLVPLLVALLLTLLLAYVMCCRREGRLKRDLATSDIQMVHHRTIRGNTEELRQMASSREVPRPLSTLPMFNVHTGERL
PPQVDSAQVPLILDQH (SEQ ID NO: 138)
>sp|Q0VCU7|SGCG_BOVIN Gamma-sarcoglycan OS = Bos taurus OX = 9913 GN = SGCG PE = 2 SV = 1
MVREQYTTITEGTHIERPENQAVYKIGIYGWRKRCLYLFVLLLLIVLLVNFALTIWILRVMWFSPVGMGHLHVTADGLHLEGESEFLFPLYVK
EIRSRVDSSLLLQSTQNVTMNARNTEGEVTGRLKVGPQMVEVQSQQFQIHSKDGKPLFTVDEEKVMVGTDKLRVTGPEGALFEHSVETPLVRP
DPPQDLRLESPTRSLSMDAPKGIHIQAPAGKIEALTQMDIVLQSSDGTVVLDAETVCLPELALGSQGPAGSSQGLYEVCVCPDGKLYLSVAGM
GTTCHEHSHLCL (SEQ ID NO: 139)
Skeletal and smooth muscle tissue
>sp|P12003|VINC_CHICK Metavinculin OS = Gallus gallus OX = 9031 GN = VCL PE = 1 SV = 4
MPVFHTRTIESILEPVAQQISHLVIMHEEGEVDGKAIPDLTAPVSAVQAAVSNLVRVGKETVQTTEDQILKRDMPPAFIKVENACTKLVRAAQ
MLQADPYSVPARDYLIDGSRGILSGTSDLLLTFDEAEVRKIIRVCKGILEYLTVAEVVETMEDLVTYTKNLGPGMTKMAKMIDERQQELTHQE
HRVMLVNSMNTVKELLPVLISAMKIFVTTKNTKSQGIEEALKNRNFTVEKMSAEINEIIRVLQLTSWDEDAWASKDTEAMKRALALIDSKMNQ
AKGWLRDPNAPPGDAGEQAIRQILDEAGKAGELCAGKERREILGTCKTLGQMTDQLADLRARGQGATPMAMQKAQQVSQGLDLLTAKVENAAR
KLEAMTNSKQAIAKKIDAAQNWLADPNGGSEGEEHIRGIMSEARKVAELCEEPKERDDILRSLGEISALTAKLSDLRRHGKGDSPEARALAKQ
IATSLQNLQSKTNRAVANTRPVKAAVHLEGKIEQAQRWIDNPTVDDRGVGQAAIRGLVAEGRRLANVMMGPYRQDLLAKCDRVDQLAAQLADL
AARGEGESPQARAIAAQLQDSLKDLKARMQEAMTQEVSDVFSDTTTPIKLLAVAATAPSDTPNREEVFEERAANFENHAARLGATAEKAAAVG
TANKTTVEGIQATVKSARELTPQVVSAARILLRNPGNQAAYEHFETMKNQWIDNVEKMTGLVDEAIDTKSLLDASEEAIKKDLDKCKVAMANM
QPQMLVAGATSIARRANRILLVAKREVENSEDPKFREAVKAASDELSKTISPMVMDAKAVAGNISDPGLQKSFLDSGYRILGAVAKVREAFQP
QEPDFPPPPPDLEHLHLTDELAPPKPPLPEGEVPPPRPPPPEEKDEEFPEQKAGEAINQPMMMAARQLHDEARKWSSKPVTVINEAAEAGVDI
DEEDDADVEFSLPSDIEDDYEPELLLMPTNQPVNQPILAAAQSLHREATKWSSKGNDIIAAAKRMALLMAEMSRLVRGGSGNKRALIQCAKDI
AKASDEVTRLAKEVAKQCTDKRIRTNLLQVCERIPTISTQLKILSTVKATMLGRTNISDEESEQATEMLVHNAQNLMQSVKETVREAEAASIK
IRTDAGFTLRWVRKTPWYQ (SEQ ID NO: 140)
>tr|E1BPV6|E1BPV6_BOVIN Smoothelin like 1 OS = Bos taurus OX = 9913 GN = SMTNL1 PE = 4 SV = 2
MEQKAGKSSEDGATVPPAAEAPEPAGSGGSAEEETAGPAESAARAGPATAGQQERAPAEDAVSAECQADGLGEVKAESQGEVELQQEDPGQGE
TAAAHGKTDRKDQTDSEPEGAEGDRETASASEEQSADEKEARLGSRETVDASREVQAEPKQASGAQEAEAGGGEAEGPQEEGGKTEEPQAEAR
EEAGAPAAQPDSEPGSPDEEQDQGAGAEAEDGAGGPPSSPEGWPESPTEEGGSASPEGLSPDTAASEELGPSASDSSPSDVPQSPTEPPPSEE
KKKEKAPERRVSAPTRPRGPRAQNRKAIVDKFGGAAAGPTALFRNTKAAGAAVGGVRNMLLEWCRAMTRSYEHVDIQNFSSSWGSGMAFCALI
HKFFPDAFDYAALDPAQRRHNFTLAFSTAEKLADCAQLLEVDDMVRLAVPDSKCVYTYIQELYRSLVQKGLVKTKKK
(SEQ ID NO: 141)
Cardiac and smooth muscle tissue
>tr|F1NHA9|F1NHA9_CHICK PDZ and LIM domain protein 3 OS = Gallus gallus OX = 9031 GN = PDLIM3
PE = 4 SV = 1
MPQNVILPGPAPWGFRLSGGIDFNQPLIITRITPGSKASTANLCPGDIIVAINGLSTENMTHNDAQERIKAAAHQLSLRIERAETKLWSPQVS
EDGKANPYKINLEAEPQEFKPIGTAHNRRAQPFVAAANIDDKRQVVSSSYNSPIGLYSSGNIQDALHGQLRSLIPNASQNDPAPTAVPQSDVY
RMLHSNQEEPSQPRQSGSFKVLQNLVSEEDGRPVGTRSVKAPVTKIPTGLPGAQKVPQCDKCGSGILGTVVKARDKYRHPECFVCSDCNLNLK
QKGYFFVEGQLYCETHARARMRPPEGYEAVTVYPKC (SEQ ID NO: 142)
Skeletal, cardiac, and smooth muscle tissue
>sp|Q04205|TENS_CHICK Tensin OS = Gallus gallus OX = 9031 GN = TNSPE = 1 SV = 2
MDFGSVMNQAATPCSPAVNYELPSPGQSITKQVDTPDATRSPRGGQAHCKASRSMSVTAAMESSCELDLVYITERIIAVSYPSTAEEQSFRSN
LREVAHMLKSKHGDNYVLFNLSERRHDISKLHPKVLDFGWPDLHTPALEKICSICKAMDTWLNAAAHNVVVLHNKGNRGRLGVVVAAYMHYSN
ISASADQALDRFAMKRFYEDKVVPVGQPSQKRYIHYFSGLLSGSIKMNNKPLFLHHVIMHGIPNFESKGGCRPFLKIYQAMQPVYTSGIYNVQ
GDSQTGICITIEPGLLLKGDILLKCYHKKFRSPTRDVIFRVQFHTCAVHDLDIVFGKEDLDEAFRDERFPEYGKVEFVFSYGPEKIQGMEHLE
NGPSVSVDYNTSDPLIRWDSYENFNIQREDSAEGTWAEPALPGKHLEKEVGHTQGPLDGSLYAKVKKKDSLHGSIGAVNTARLPLSAAPNHVE
HTLSVSSDSGNSTASTKTDRTDEPGAPGAPTGHAVLSPEEKRDVDRLLVGFGLESAAPMHNHAPGPAPARLPAGPGRHVVPAQVHVNGAGTPL
LAERETDILDDELPNQDGHSVGSLGTLSSLDGTTTASEAGFHEAPRVGSLSSLPNGPASYNGAEKMLKEGLYEAEPLSNGAYPYSNQNTLMGH
HLRDPLAHLRPSRSAQEHLAGYPQRQPASASPAWLQPPVPQPYLYGYDLPSAHRSQSFPAVGTAKYEANLALPQAPARSTSSREAVQRGLNSW
QQQGGSRPPSQLHDGGLESHSPSLSSCSPQPSPLQPMPPHSHSMPEFPRAPSRREIEQSIEALDVLMLDLAPSVHKSQSVPSAATRQDKPAAM
LSSLSAQRLSGHYAQPTPQVVQPRSFGTSVGTDPLAKPYSPGPLVPAARSTAEPDYTVHEYRETYTPYSYQPVPEPRSYGSAPASILPLSASY
SPAGSQQLLVSSPPSPTAPAQSQLPHKGLESYEDLSRSGEEPLNLEGLVAHRVAGVQSREKSPEESTVPARRRTPSDSHYEKSSPEPGSPRSP
TVLSPEVVSTIAANPGGRPKEPHLHSYKEAFEEMESASPSSLTSGGVRSPPGLAKTPLSALGLKPHNPADILLHPVGELEGEAGADSEEEPRS
YVESVARTATTGRAGNLPAAQPVGLEVPARNGAFGNSFTVPSPVSTSSPIHSVDGASLRSYPSEGSPHGTVTPPHAVAETAYRSPMVSQTPSA
HSSYQTSSPSSFQAGTLGSPYASPDYPDGRGGFQPDPQARQQPQVSVVGVHALPGSPRTLHRTVATNTPPSPGFGRRAANPAVASVPGSPGLG
RHTVSPHAPPGSPSLARHQMAAVPPGSPMYGYSSPEERRPTLSRQSSASGYQPPSTPSFPVSPAYYPGTSTPHSSSPDSAAYRQGSPTPQPAL
PEKRRMSAGERSNSLPNYATVNGKASSPLSSGMSSPSSGSAVAFSHTLPDFSKFSMPDISPETRANVKFVQDTSKYWYKPDISREQAIALLKD
REPGAFIIRDSHSFRGAYGLAMKVASPPPTVMQQNKKGDITNELVRHFLIETSPRGVKLKGCPNEPNFGCLSALVYQHSIMPLALPCKLVIPD
RDPMEEKKDAASTTNSATDLLKQGAACNVLFINSVEMESLTGPQAISKAVAETLVADPTPTATIVHFKVSAQGITLTDNQRKLFFRRHYPLNT
VTFCDLDPQERKWTKTDGSGPAKLFGFVARKQGSTTDNVCHLFAELDPDQPAAAIVNFVSRVMLGSGQKR (SEQ ID NO: 143)
>tr|A0A1D5PNS4|A0A1D5PNS4_CHICK Gelsolin OS = Gallus gallus OX = 9031 GN = GSN PE = 4 SV = 1
MSEVGEEQNGGRGAGLGGITAALGLVLIPIPIPILVPVPIPIPIPIPPPQGRKGQSRHRALAGAGPGWGGVRAVTAPGAARCARPRAPQLRPA
RPERQQQPVSMVEHAEFSKAGKEPGLQIWRIEKFDLVPVPKNLYGDFFTGDSYLVLNTIRQRSGNLQYDLHFWLGDESSQDERGAAAIFTVQM
DDYLQGKAVQHREVQGHESSTFLGYFKSGIKYKAGGVASGFRHVVPNEVTVQRLLQVKGRRTVRATEVPVSWESFNTGDCFILDLGSNIYQWC
GSNSNRQERLKATVLAKGIRDNERNGRAKVFVSEEGAEREEMLQVLGPKPSLPQGASDDTKTDTANRKLAKLYKVSNGAGNMAVSLVADENPF
SQAALNTEDCFILDHGTDGKIFVWKGRSANSDERKAALKTATDFIEKMGYPKHTQVQVLPESGETPLFKQFFKNWRDKDQTEGLGEAYISGHV
AKIEKVPFDAATLHTSRAMAAQHGMEDDGSGKKQIWRIEGSEKVPVDPATYGQFYGGDSYIILYDYRHAGKQGQIIYTWQGAHSTQDEIATSA
FLTVQLDEELGGSPVQKRVVQGKEPPHLMSMFGGKPLIVYKGGTSREGGQTTPAQTRLFQVRSSTSGATRAVELDPVASQLNSNDAFVLKTPS
AAYLWVGRGSNSAELSGAQELLKVLGARPVQVSEGREPDNFWVALGGKAPYRTSPRLKDKKMDAHPPRLFACSNKSGRFTIEEVPGDLTQDDL
ATDDVMILDTWDQVFVWIGKDAQEEEKTEALKSAKRYIETDPASRDKRTPVTLVKQGLEPPTFSGWFLGWDDDYWSVDPLQRAMADVDV
(SEQ ID NO: 144)
>XP_025010159.1 dystroglycan isoform X1 [Gallus gallus]
MTVGCVPQPPFLGRTLLPVLLLAASARCHWPSEPAEVVRDWENQLEASMHSVLSDLRETVPAVVGIPDSSAVVGRFFRVSIPTDLIASNGEAV
QVSEAGKESLPSWLHWNAESSSLEGLPLDTDKGVHYISVTTLQPFPNGSYVPQAANVFSVEVHQEDHSEPQSVRAAAQEAGDAAPFVCGAEEP
VTILTVILDADLTKMTPKQRIELLNRMRSFSEVELHNMKLVPVVNNRLFDMSAFMAGPGNAKKVVENGALLSWKLGCSLSQNSVPNISKVEAP
AKEGTMSARLGYPVVGWHIANKKPHLPKRMRRQINATPTPLTAIGPPTTAAQEPPTRIVPTPTSPAIAPPTETTAPPVREPIPLPRKPTVTIR
TRGPIVQTPTLGPIQPTRLVEGTGTVSVPIRPTVPGYVEPTAVITPPTTTTKKPRVSTLKPATPSTTDSSTATTRRPTRRPKTPRPTKPPSTT
RSTISKLTTASPPTRVRTTASGVPRPWEPNEPPKLTNHIDRVDAWEGTYFEVKIPSDTFYDKEDTTTDKLQLTLKLKEQQMIEENSWVQFNST
SQLMYGMPDRSHVGKHEYFMYATDKGGLFAVDAFEIHVHKRPHGDKSPVKFKARLEGDHSAVANDIHKKIMLVKKLALAFGDRNSSTITVQDI
AKGSIVVEWTNNTLPLEPCPREQIRTLSKKIADDSGGPSPAFSNILQPEFKPLNVSVVGSGSCRHIQFVPVTKDGRVISEATPTLAAGKDPEK
SSEDDVYLHTVIPAVVVAAILLVAGIIAMICYRKKRKGKLTIEDQATFIKKGVPIIFADELDDSKPPPSSSMPLILQEEKAPLPPPEYPNQSM
PETTPLNQDTIGEYTPLRDEDPNAPPYQPPPPFTAPMEGKGSRPKNMTPYRSPPPYVPP (SEQ ID NO: 145)
>sp|P12003-1|VINC_CHICK Isoform 1 of Vinculin OS = Gallus gallus OX = 9031 GN = VCL
MPVFHTRTIESILEPVAQQISHLVIMHEEGEVDGKAIPDLTAPVSAVQAAVSNLVRVGKETVQTTEDQILKRDMPPAFIKVENACTKLVRAAQ
MLQADPYSVPARDYLIDGSRGILSGTSDLLLTFDEAEVRKIIRVCKGILEYLTVAEVVETMEDLVTYTKNLGPGMTKMAKMIDERQQELTHQE
HRVMLVNSMNTVKELLPVLISAMKIFVTTKNTKSQGIEEALKNRNFTVEKMSAEINEIIRVLQLTSWDEDAWASKDTEAMKRALALIDSKMNQ
AKGWLRDPNAPPGDAGEQAIRQILDEAGKAGELCAGKERREILGTCKTLGQMTDQLADLRARGQGATPMAMQKAQQVSQGLDLLTAKVENAAR
KLEAMTNSKQAIAKKIDAAQNWLADPNGGSEGEEHIRGIMSEARKVAELCEEPKERDDILRSLGEISALTAKLSDLRRHGKGDSPEARALAKQ
IATSLQNLQSKTNRAVANTRPVKAAVHLEGKIEQAQRWIDNPTVDDRGVGQAAIRGLVAEGRRLANVMMGPYRQDLLAKCDRVDQLAAQLADL
AARGEGESPQARAIAAQLQDSLKDLKARMQEAMTQEVSDVFSDTTTPIKLLAVAATAPSDTPNREEVFEERAANFENHAARLGATAEKAAAVG
TANKTTVEGIQATVKSARELTPQVVSAARILLRNPGNQAAYEHFETMKNQWIDNVEKMTGLVDEAIDTKSLLDASEEAIKKDLDKCKVAMANM
QPQMLVAGATSIARRANRILLVAKREVENSEDPKFREAVKAASDELSKTISPMVMDAKAVAGNISDPGLQKSFLDSGYRILGAVAKVREAFQP
QEPDFPPPPPDLEHLHLTDELAPPKPPLPEGEVPPPRPPPPEEKDEEFPEQKAGEAINQPMMMAARQLHDEARKWSSKGNDIIAAAKRMALLM
AEMSRLVRGGSGNKRALIQCAKDIAKASDEVTRLAKEVAKQCTDKRIRTNLLQVCERIPTISTQLKILSTVKATMLGRTNISDEESEQATEML
VHNAQNLMQSVKETVREAEAASIKIRTDAGFTLRWVRKTPWYQ (SEQ ID NO: 146)
>tr|E1C8N4|E1C8N4_CHICK Supervillin OS = Gallus gallus OX = 9031 GN = SVIL PE = 4 SV = 3
MKRKERIARRLEGIENDTQPMLLQNCPGSVTHRLLEEDTPRYMRATDPYSHHLGRSNEEEEASDSSVEKQPRSSRYRTETTGGNTESLYSTGN
MDTHELESKAERIARYKAERRRQLAEKYGLSLDSDLDSDYSSRYSRARKDPDSVERKALRSERHDDENKDSGSLYLSRTEVKESKSVLSESRE
YSSREKDGIPAKEELSNEKSDKRADDDSAIRQASDPSATLDSSVSLTLSGRESSSCNEVPISPKQSPRESLSSPKRAASPIHLQNDQPLHSNI
RQSESRFEMSTSGSALSAGGDRERGPRRPRRYFTPGENRKTSERFKTQPITSAERKETDRSIMCAEIPTADDEEKLDDRAKLSVAAKRLLFRE
MEKSFEMKNIPKPPTRSSAVERRMRRLQDRSHTQPITSEEVVIAATLQASAHQKILAKEEIRAAKEAMGQDQSDEPDSSTLSLAEKMALFNKL
SQPVSRAISTRSRGDIRHRRMNTRYQTQPVTLGEVEQVQNESGKLTPLSSTVSTSVSAMASALSALFAGDMHAKSRSDGSVSAATKDELRFHA
SAESSDSSGKRTQKSEQWQPSMEVLESKRASKKHEEEGKRFLAHEANEIRKYSSFEDETTHPVLEKTGDYHKEAAYSFLRKGSMELFSSQPLF
QPLERKEIDTIMQDHVEPTSELTSTPATRTLSQTTAAASCRLQELSEQLEGKFYKNSCEMFSAGENKIQTTEDATDSSSKTMSIKERLALLKK
SGEEDWKSRLSKKQEYAKVSATDRSAQMQEVEQLLKKRIADNQESQMTIEERKHLITAREEAWKSRGKGAANDSTQFTVAGRMVKKGLASPSA
LTPVASPYGNRQKSTTPVTKPLEEIEARPDMQLESDMKLDKLESFLGRLNNKVAGMQETVLTVTGKSVKEVMKLDDDETFSKFYRRVDFPSSS
VPLDLDEDFDAIFDPYAPKLISSVAEHKRAVRPMRRVQSSRNPLKMLAAREDILHEYTEQRLNVAFMESKRMKVEKMSANSNFSEVALAGLAS
KENFSNVSLRSVNLTEQNSNNSAVPYKKLMLLQIKGRRHVQTRLVEPRASSLNSGDCFLLLTPHLCFLWVGEFANVIEKAKASELATLIQTKR
ELGCRASYIQTIEEGINTHTHAAKDFWKLLGGQANYQSAGRPEEDEMYEAAIIETNCIYRLVEDKLIPEDDYWGKMPKCTLLQPKEVLVFDFG
SEVYVWHGKEVTLAQRKVAFQLAKHLWNGTFDYSNCDINPLDPGECNPLIPRKGQGRPDWAVFGRLTEHNETILFKEKFLDWTELKKLNEKNS
SESLHQKEESKSDSKPYDVMLMVPVPQTAVGTVLDGMNIGRGYGLVEGEDGRQFEIITASVDVWHILEFDYSRLPKQSIGQFHEGDTYVVKWK
YMVSTTVGSRQKGEQQVRAVGKEKCVYFFWQGRHSTVSEKGTSALMTVELDEERGAQVQVLQGKELPCFLQCFQGGMIVHAGRREEEEENAQS
DWRLYCVRGEVPNEGNLLEVACHCSSLRSRTSMIVLNINKALIYLWHGCKAQSHTKDVGRTAANKIKEQCPLEAGLHSSSKVTIHECDEGSEP
LGFWDALGRRDRKAYDCMLQDPGKFNFTPRLFSLSSSSGEFSATEYVYPSRDPTVINSMPFLQEDLYTAPQPALFLVDNHHEVYLWQGWWPVE
NKITGSARIRWATDRKCAMETVLQYCKGKNVKKPPKSYLIHAGLEPLTFTNMFPSWEHREDIAEITEMDADVSNQIILVEDVLAKLCKTVYPL
ADLLARPLPEGVDPLKLEIYLSDEDFEVALEMTREEYNALPSWKQVNLKKAKGLF (SEQ ID NO: 147)
>tr|Q5ZL50|Q52L50_CHICK Profilin OS = Gallus gallus OX = 9031 GN = PFN2 PE = 2 SV = 1
MAGWQSYVDNLMCDGCCQEAAIVGYCDAKYVWAATAGGIFQSITPVEIDMIVGKDREGFFTNGLTLGAKKCSVIRDSLYVDGDCTMDIRTKSQ
GGEPTYNVAVGRAGRVLVFVMGKEGVHGGGLNKKAYSMAKYLRDSGF (SEQ ID NO: 148)
>sp|A5PJI6|CAVN4_BOVIN Caveolae-associated protein 4 OS = Bos taurus OX = 9913 GN = CAVIN4
PE = 2 SV = 2
MEHNGSASNADKIHQNRLSNVTEDEDQDAALTIVTVLDKVAAIVDSVQASQKRIEERHRVMENAIKSVQIDLLKFSQSHSNTGYVINKLFEKT
RKVSAHIKDVKARVEKQQTHVKKVEAKQEEIMKKNKFRVVIFQEEVQCPTSLSVVKDRSLTESPEEVDEIFDTPVDLSSDEEYFVEESRSARL
KKSGKERIDNIKKAFSKENMQKTRQNFDKKVNRIRTRIVTPERRERLRQSGERLRQSGERLKQSGERFKKSISNAAPSREAFKMRSLRKTKDR
AVAEGPEEVREMGVDIIARGEALGPISELYPEALSETDPEEASATHPPQEGGEVSTPEPLKVTFKPQVKVEDDESLLLDLKQ
(SEQ ID NO: 149)
>sp|Q62234|MYOM1_MOUSE Myomesin-1 OS = Mus musculus OX = 10090 GN = Myom1 PE = 1 SV = 2
MSLPFYQRSHQHYDLSYRNKDLRTTMSHYQQEKKRSAVYTHGSTAYSSRSLAARRQESEAFSQASATSYQQQASQTYSLGASSSSRHSQGSEV
SRKTASAYDYGYSHGLTDSSLLLEDYSSKLSPQTKRAKRSLLSGEETGSLPGNYLVPIYSGRQVHISGIRDSEEERIKEAAAYIAQKTLLASE
EAIAASKQSTASKQSATSKRTTSTLQREETFEKKSRNIAIREKAEELSLKKTLEETQTYHGKLNEDHLLHAPEFIIKPRSHTVWEKENVKLHC
SVAGWPEPRLTWYKNQVPINVHANPGKYIIESRYGMHTLEISKCDFEDTAQYRASAMNVQGELSAYASVVVKRYKGELDESLLRGGVSMPLSF
AVTPYGYASKFEIHFDDKFDVSFGREGETMSLGCRVVITPEIKHFQPEVQWYRNGAPVSPSKWVQPHWSGDRATLTFSHLNKEDEGLYTIRVR
MGEYYEQYSAYVFVRDADAEIEGAPAAPLDVVSLDANKDYIIISWKQPAVDGGSPILGYFIDKCEVGTDTWSQCNDTPVKFARFPVTGLIEGR
SYIFRVRAVNKTGIGLPSRVSEPVAALDPAEKARLKSHPSAPWTGQIIVTEEEPTEGVIPGPPTDLSVTEATRSYVVLSWKPPGQRGHEGIMY
FVEKCDVGAENWQRVNTELPVKSPRFALFDLVEGKSYRFRVRCSNSAGVGEPSETTEVTVVGDKLDIPKAPGKIIPSRNTDTSVVVSWEESRD
AKELVGYYIEASVVGSGKWEPCNNNPVKGSRFTCHGLTTAQSYIFRVRAVNAAGLSEYSQDSEAIEVKAAIGGGVSPDVWPQLSDTPGGLTDS
RGGMNGASPPTSQKDALLGSNPNKPSPPSSPSSRGQKEVSTVSESVQEPLSSPPQEAAPEEEQSQSEPPKKKKDPVAVPSAPYDITCLESFRD
SMVLGWKQPDTTGGAEITGYYVNYREVVGEVPGKWREANIKAVSDAAYKISNLKENTLYQFQVSAMNIAGLGAPSTVSECFKCEEWTIAVPGP
PHSVKLSEVRKNSLVLQWKPPVYSGRTPVTGYFVDLKEASAKDDQWRGLNEAAIVNKYLRVQGLKEGTSYVFRVRAVNQAGVGKPSDLAGPVV
AETRPGTKEVVVSVDDDGVISLNFECDQMTPKSEFVWSKDYVPTEDSPRLEVENKGDKTKMTFKDLGTDDLGTYSCDVTDTDGIASSYLIDEE
EMKRLLALSQEHKFPTVPTKSELAVEILEKGQVRFWMQAEKLSSNAKVSYIFNEKEIFEGPKYKMHIDRNTGIIEMFMEKLQDEDEGTYTFQI
QDGKATGHSTLVLIGDVYKKLQKEAEFQRQEWIRKQGPHFAEYLSWEVTGECNVLLKCKVANIKKETHIVWYKDEREISVDEKHDFKDGICTL
LITEFSKKDAGFYEVILKDDRGKDKSRLKLVDEAFQDLMTEVCKKIALSATDLKIQSTAEGIRLYSFVCYYLDDLKVNWSHNGTGIKYTDRVK
SGVTGEQIWLQINEPTPNDKGKYVMELFDGKTGHQKTVDLSGQAFDEAFAEFQRLKQAAIAEKNRARVLGGLPDVVTIQEGKALNLTCNVWGD
PPPEVSWLKNEKPLTSDDHCSLKFEAGKTAFFTISGVSTADSGKYGLVVKNKYGSETSDFTVSVFIPEEELRKGAMEPPKGNQKSK
(SEQ ID NO: 150)
>tr|F1MKE9|F1MKE9_BOVIN Spectrin beta chain OS = Bos taurus OX = 9913 GN = SPTB PE = 3 SV = 2
QPADMTSATEFENVGNQPPYSRINARWDGPDDELDNDNSSARLFERSRIKALADEREVVQKKTFTKWANSHLVHVSCRITDLYKDLRDGRMLI
KLLEVLSGEMLPKPTKGKMRIHCLENVDKALQFLREQRVHLENMGSHDIVDGNHRLVLGLIWTIILRFQIQDIVVQTQEGRETRSAKDALLLW
CQMKTAGYPHVNVTNFTSSWKDGLAFNALIHKHRPDLIDFDKLKDSNARHNLEHAFEVAERELGIIPLLDPEDVFTENPDEKSIITYVVAFYH
YFSKMKVLAVEGKRVGKVIDHAIETEKMIEKYSGLASDLLTWIEQTITILNSRKFANSLAGVQQQLQAFSTYRTVEKPPKFQEKGNLEVLLFT
IQSRMRANNQKVYTPHDGKLVSDINRAWESLEEAEYRRELALRDELIRQEKLEQLARRFDRKAAMRETWLNENQRLVAQDNFGYDLAAVEAAK
KKHEAIETDTAAYEERVRALEDLAQELERENYHDQKRIMARKDNILRLWDYLQELLQARRQRLEKTLDLQKLFQDMLHSIDWMDGIKAHLLSA
EFGKHLLEVEDLLQKHKLMEADIAIQGDKVKAITTATLQFTEGPGYQPCDPQVIQDRVSHLEQCFEELSNTAAGRKAQLEQSKQLCKFFWEMD
EAESWIKEKEQIYSSLDYGKDLTSVLILQRKHKAFEDELRGLDAHLDQIFREAEGMVARKQFGHERIEVRIKKVSDQWNELKDLAAFCKKNLQ
DTENFFQFQGDADDLKAWLQDAHRLLSGEDVGHDEGATRALGKKHKDFLEELEESRGVMEHLEQQAQAFPQGFQDSPDVTNRLQALRDLYQQV
VAQADMRQQRLQDALDLYTVFGETDACELWMGEKGKWLAQMEIPDTLEDLEVVQHRFDILDQEMKTLMTQIDGVNLAANSLVESNHPRSAEVK
KYQDRLNTRWQDFQTMVSERREAVDSALRVHNYCVDCEETGKWIADKTKVVESTKDLGRDLAGVIAIQRKLSGLERDVAAIQARLGTLERESQ
QLMASHPELKEDIEQRQAYVEELWQGLMQALKSQEASLGEASQLQAFLQDLDAFQAWLSTTQKDVASKDMPESLPEAEQLLQQHAAIKDDIDR
HQESYQKVRVSGEKVTHGQTDPEYLLLGQRLDGLEKGWDALSRMWESRSQALTQCLGFQEFQKDAKQAEAILSNQEYTLAHLEPPDSLEAAEA
GIRKFEDFLLSMENNRDKVLSPVDSGNKLVAEGNLYSDKIKEKVQLIEDRHRKNNEKAQEASDLLKDNLELQNFLQNCQELTLWINDKLLTSQ
DVSYDEARNLHNKWLKHQAFVAELASHQGWLENIDAEGKQLMEEKPQFAVLVSQKLEALHQLWDELQANTQEMAQHLSAARSSDLRSQTQADL
NKWIRAMEDQLQSDDLGKDLTSVNRMLAKLKRVEDQVNVRKEELQELFAQMPSLGEEAGDEALSIEKRELDLLEPLGRRKKQLESSRAKLQIS
RDLEDETLWVEERLPLAQSTDYGTNLQTVQLFMKKNQTLQNEILGHTPRVEDVLHRGQQLVAAAEIDCQDVEERLGKLQGSWDTLQEAAASRL
QHLREASEAQQYYLDAGEAEAWIGEQEFYVESDENPQDEESAIVMLKRHLRQQRAVDEYGRNIKQLAGRAQGLLSAGHPEGEQIIRLQGQVDK
QYAGLKDMAEERRRKLENMYHLFQLKREVDDLEQWITEKDTVASSSEMGQDFDHVTVLRDKFRDFARETGAIGQERVDNVNAIIERLIDAGHS
EAATIAEWKDGLNEMWADLLELIDTRMQLLAASYDLQRYFYTSSEILGLIGEKHRELPEDVGLDASTAESFHRTHTAFERELHLLGEQVQQFQ
DVAARLQTAYAGEKADIIQNKEQEVSAAWQALLDACAGRRTQLVDTADKERFFSMARDLLSWMESIVRQIETQEKPRDVSSVELLMKYHQGIQ
AEIETRSKNFSTCLELGESLLQRQHQASEEIREKREQVVSRREEMQEKWEARWERLRMLLEVCQFFRDASVAEAWLIAQEPYLASRDYGHTVD
SVEKLIKRHEAFEKSAASWEGRFAALEKPTTLELKERQTPERTEEEPGLQEEEGETAGEAPRGPHQATTERTSPGEEERPWPQDLQPPPPPGP
HEDGQEEKSSTDERPATEPLFKVLDTPLSEGDEPTTLPAQRDRGHSVQMEGFLGRKHDLEGPNKKASNRSWNNLYCVLRNSELAFYKDAKNLA
LGVPYHGEEPLALRHAICEIAANYKKKKHVFKLRLSNGSEWLFHGKDEEEMLSWLQGVSTAINESQSIRVKAQSLPLPPITGPEASLGKKDKE
KRFSFFPKKK (SEQ ID NO: 151)
>tr|E1BIS6|E1BIS6_BOVIN Synemin OS = Bos taurus OX = 9913 GN = SYNM PE = 1 SV = 2
MLSWRLHTGPEKAELQELNARLYDYVCRVRELERENLLLEEELRSRRGQEGLWAEAEARCTEEARGLRRQLDELSWATALAQGERDALRRELR
ELQLLGEETRAARGRLDAELDSQRRELQEELAARAALEALLGRLQAERRGLDAARERDVRELRARAAGLTLRYRGRVAGPAAPPLRLRELHED
CALLVTEAWRETVQRYEDEVRELEEALRRGRESRREAEEETRLCAQEAEALRREVLELEQLRALLEEELLRVREASELQAEERQREIAYLEDE
KAALTLAMADRLRDYQDLVQVKTGLSLEVATYRALLEGESNPEILIVECIENMPQEFREKSYQYTTSVLQKENERNLFPRQKAPPASFRQSLA
PRSQTPVRSDARRDVLGSGYSSFTTAWQENAYQKTASGQTNFRTFSPTPGLLRNTEAQLKTFPERPRTEGTKAPPASSAKESAAAAEPYQERR
AEEAAAASEGTWSNERTVIWGKKTEAKATKEQERNRPGTIQTKREEKMFDSKEKASEERNLRWEELTKLDKEARKRESEQMREKAREKESLKE
ESVKGREIPIRLEASQDSTAKVAPQDLQTPLKEDAGDGTGRGVETREAGFTLGASDTTASLKGGSMTETIAENIVSSILKQFTHSPEAEASAE
SFPDTKVTYVDRKEVPGDRKAKTEIVVESKLTEEIDISDEAGLDYLLSKDAKEVELKGKSAERLIGDVIRLGLKGKEGRAKVVNVEIIEEPMS
YVSSEKEDEFSTPFEVEEIDDVSPSSRGLVEEREEAVYGESDVTCSGDAGQEARRPQESVTHVEEVTEAGDLEGEQSYFVSTPDEHPGAPERE
EGSVYGQIHIEEESTIRYSWQDEIVPGSRRRVRRDDVPGEKVVKPVDVPEVPLEGDTASAPWKEQTRSGEFHAKPIVIEKEIKIPHEFHTSIK
EGSKEPRHQLVEVIEQLEENLPERMKEELSALTREGQGGPAGVSFDVKKVQSAGSGAVTLVAEVNLSQTVDADQLDLEELSKDEAGEIEKAVE
SVVRDSLARRRSPGPGSPEAEAGGGFRRWATQELYSSSAGEADAGLASPPGPVSATVEVTSPTGFVHAHVLEDVSQSGGRVQIASPGMWRTEQ
VSAEGRAAQAVEVSAEGQASWAEGSAGTSRSARLITLGARQSPVSTEVIFPGPDAACPEAGGTEEPGPAELPTEPPRFGRHSPFGSQQFYAQR
EVIFQAPVSGVGKAGDSSQAEESAGTQTSVKHLQLGTREGLTEQTQLTAPLSGAVELGVREASVLMEAWSGDGTSIRHVTIGPQRHQATEPIV
PPPLEFSDSESSTHREGSADETLATSSYTVGRNILVTEKSTFQRAVSESPQEASAEDMSGNEVTSGVSRSFRHIQLGPAEAKTSEHIVFHGPI
SKTFALAGSVDSPEVSEVADSGRTLRHVALGPKETSFTFQMDVSNVEATSRWTQEARVLFPAGTEAEAPSVSEPGAWRDASSRNDLAAGVSFQ
GSAGDRHQAPGERGKEQAEFDKTVQLQRMVDQRSVISDEKKVALLYLDSQEEENEGHWF (SEQ ID NO: 152)
>tr|E11B59|E1BF59_BOVIN Plectin OS = Bos taurus OX = 9913 GN = PLEC PE = 1 SV = 2
MVAGMFMPLDQLRAIYEVLFREGVMVAKKDRRPRSLHPHVPGVTNLQVMRAMASLRARGLVRETFAWRHFYWYLTNEGIAHLRQYLHLPPEIV
PASLQRVRRPVAMVMPARRTPHVQAVQGPLGCPPKRGPPPTEDPAREERCVYRRKEPEEGAPEPPVVPAATPGTLARQGLEPAPPTDERDRVQ
KKTFTKWVNKHLIKAQRHISDLYEDLRDGHNLISLLEVLSGDSLPREKGRMRFHKLQNVQIALDYLRHRQVKLVNIRNDDIADGNPKLTLGLI
WTIILHFQISDIQVSGQSEDMTAKEKLLLWSQRMVEGYQGLRCDNFTSSWRDGRLFNAIIHRHKPMLIDMNKVYRQTNLENLDQAFSVAERDL
GVTRLLDPEDVDVPQPDEKSIITYVSSLYDAMPRVPDVQDGVKANELQLRWQEYRELVLLLLQWIRAHTAAFEERRFPSSFEEIEILWCQFLK
FKETELPAKEADKNRSKGIYQSLEGAVQAGQLKVPPGYHPLDVEKEWGKLHVAILEREKQLRSEFERLERLQRIVSKLQMEAGLCEEQLNQAD
ALLQSQDVRLLAAGKAPQRAGEVERDLDKADGMIRLLFNDVQALKDGRHPQGEQMYRRVYRLHERLVAIRTEYNLRLRGTPRHPELEDSTLRY
LQDLLAWVEENQRRLDGAEWGVDLPSVEAQLGSHRGLHQSVEEFRAKIERARTDEGQLSPATRGAYRDCLGRLDLQYAKLLNSSKARLRSLES
LHGFVAAATKELMWLSEKEEEEVGFDWSERNSNMAAKKEAYSALMRELELKEKKIKEIQSTGDRLLREDHPARPTVESFQAALQTQWSWMLQL
CCCIEAHLKENTAYFQFFSDVREAEEQLRKLQETLHRKYTCDRSITVTRLEDLLQDAQDEKDQLNEYRGHLSGLAKRAKAIVQLTPRNPTQPT
RGRVPLLAVCDYKQVEATVHKGDECQMLGPAQPFHWKVLSGSGSEAAVPSVCFLVPPPNQEALEAVARLEAQHQALVTLWHQLHTDMKSLLAW
QSLSRDVQLIRSWSLVTFRTLKPEEQRQALRSLELHYQAFLRDSQDAGGFGPEDRLQAEREYGSCSRHYQQLLQSLEQGKCGQCGXLDKEPAR
ECAQRIAEQQKAQAEVEGLGKGVARLSAEAEKVLALPEPSPAAPTLRSELELTLGKLEQVRSLSAIYLEKLKTISLVIRSTQGAEEALKAHEE
QLKEAQAVPAALPELEATKAAMKKLRAQAEAQQPVFDALRDELRGAQEVGERLQQRHGERDVEVERWRERVTQLLERWQAVLAQTDVRQRELE
QLGRQLRYYRESADPLGAWLQDARRRQEQIQAVPLADSQAVREQLRQEKALLEEIERHAEKVEECQRFAKQYINAIKDYELQLVTYKAQLEPV
ASPAKKPKVQSGSESVIQEYVDLRTRYSELSTLTSQYIRFISETLRRMEEEERLAEQQRAEERERLAEVEAALEKQRQLAEAHAQAKAQAERE
AQELQRRMQEEVARREEVVVDAQQQKRSIQEELQQLRQSSEAEIQAKARQVEAAERSRLRIEEEIRVVRLQLETTERQRGGAEGELQALRARA
EEAEAQKRQAQEEAERLRRQVQDETQRKRQAEAELGLRVKAEAEAAREKQRALQALEELRLQAEEAERRLRQAEAERARQVQVALETAQRSAQ
AELQSKHASFAEKTAQLERTLEEEHVTVVQLREEATRREQQQAEAERAREEAERELERWQLKANEALRLRLQAEEVAQQKSLAQAEAEKQKEA
AEREARRRGKAEEQAVRQRELAEQELERQRQLAEGTAQQRLAAEQELIRLRAETEQGEQQRQLLEEELARLQSEAAAATQKRQELEAELAKVR
AEMEVLLASKARAEEESRSSSEKSKQRLEAEAGRFRELAEEAARLRALAEEAKRQRQLAEEDAARQRAEAERVLSEKLAAISEATRLKTEAEI
ALKEKEAENERLRRLAEDEAFQRRRLEEQAAQHKADIEERLAQLRKASESELERQKGLVEDTLRQRRQVEEEILALKASFEKAAAGKAELELE
LGRIRGNAEDTLRSKEQAEQEAARQRQLAAEEERRRREAEERVQKSLAAEEEAARQRKAALEEVERLKAKVEEARRLRERAEQESARQLQLAQ
EAAQKRLQAEEKAHAFAVQQKEQELQQTLQQEQSMLERLRGEAEAARRAAEEAEEARERAEGEAAQSRQRVEEAERLKQAAEEQAQAQAQAQA
AAEKLRKEAEQEAARRAQAEQAALRQKQAADAEMEKHKKFAEQTLRQKAQVEQELTALRLKLEETDHQKSILDQELQRLKAEVTEAARQRSQV
EEELFSVRVQMEELGKLKARIEAENRALILRDKDNTQRLLQEEAEKMKQVAEEAARLSVAAQEAARLRQLAEEDLAQQRALAEKMLKEKMQAV
QEATRLKAEAELLQQQKELAQEQARRLQEDKEQMAQQLAQETQGFQRTLETERQRQLEMSAEAERLRLRVAEMSRAQARAEEDAQRFRKQAEE
ISAKLHRTELATQEKVTLVQTLETQRQQSDRDADRLREAIAELEREKDKLKKEAELLQLKSEEMQTVQQEQLLQETQALQQSFLSEKDSLLQR
ERFIEEEKAKLERLFQDEVAKAQKLREEQQRQQQQMQQEKQQLLASMEEARRRQREAEEGVRRKQEELQLLEQQRQQQEQLLAEENRRLRERL
EHLEEEHRAALAHSEEITAAQAAATRALPNGQDATDGPAAEPEHAFEGLRQKVPAQQLQEAGILSTEEVQRLVQGHTTVAELTQREDVRRYLQ
GHSSIAGLLLKPANEKLTIYAALRRQLLSPGTAVILLEAQAASGFLLDPVRNRRLTVNEAVKEGVVGPELHHKLLSAERAVTGYKDPYTGEQI
SLFQAMKKDLIVREHGIRLLEAQIATGGVIDPVHSHRVPVDVAYQRGYFDEEMNRVLQDPSDDTKGFFDPNTHENLTYLQLLERCVEDPETGL
RLLPLTDQAAKGGELVYTDSEARDVFEKATVSAPFGKFQGKTVTIWELINSEYFTAEQRRDLLRQFRTGKVTVEKIIKIVITVIEEHEQKGQL
CFQGLRALVPAAELLESGVIDWDLFRQLQLGERSVQEVAEVEAVRRALRGSGVIAGVWLEEARQKLSIYEALKKELLQPEAAVALLEAQAGTG
HVIDPATSARLTVDEAVRAGLVGPELHEKLLSAEKAVTGYKDPYSGQSVSLFQALKKGLIPREQGLRLLDAQLSTGGIVDPSKSHRLPLDVAC
ARGYLDKETSTALTAPRDDAKTYYNPRTWEPATYSQLQQQCRPDPLTGLSLLPLSEEAARARQQELYSEVQAREAFQKATVEVPVGSFQGRAV
TIWELINSEYFTAEQRQELLRQFRTGKVTVEKIIKIIITIVEEVETTRRERLSFSGLRAPVPASELLASGILSSSQFEQLKDGKTSVKDLSEL
DSVRTLLQGSGCLAGIYLEESKEKVTIYEAMRRGLLRPSTAILLLEAQAATGELVDPVRNQRLYVHEAVKAGVVGPELHEKLLSAEKAVTGYK
DPYSGSTISLFQAMKKGLVVREHGIRLLEAQIATGGIIDPVHSHRVPVDVAYQRGYFDKEMNRVLEDPSDDTKGFFDPNTRENLTYRQLLERC
VEDPETGLRLLPLKGPEKAEVVETTRVYTEEETRRAFEETQIDIPGGGSHGGSTMSLWEVMQSDLIPEEQRAQLMADFQAGRVTKERMIIIII
EIIEKTEIVRQQNLASYDYVRRRLTAEDLHEARVISRESYSLLREGTRSLREVLEAESAWRYLYGTGCVAGVYLPGSRQTLTIYQALKKGLLS
AEVARLLLEAQAATGFLLDPVKGDRLTVDEAVRKGLVGPELHDRLLSAERAVTGYRDPYTEQTISLFQAMKKDLIPAEEALRLLDAQLATGGI
VDPRLGFHLPLEVAYQRGYLNKDTHDQLSEPSEVRSYIDPSTDERLSYTQLLRRCRRDEASGLFLLPLSDARKLTFRGLRKQITVEELVRSHV
MDEATAQRLQEGLTSIEEVSKNLQKFLEGTSSIAGVLVDATKERLSVYQAMKKGIIRPGTAFELLEAQAATGYVIDPIKGLKLTVEEAVRMGI
VGPEFKDKLLSAERAVTGYKDPYSGKLISLFQAMKKGLILKDHGIRLLEAQIATGGIIDPEESHRLPVDVAYQRGLFDEEMNEILTDPSDDTK
GFFDPNTEENLTYLQLMERCVTDPQTGLRLLPLKEKKRERKTSSKSSVRKRRVVIVDPETGKEMSVYEAYRKGLIDHQTYLELSEQECEWEEI
TISSSDGVVKSMIIDRRSGRQYDIDEAIAKSLIDRSALDQYRAGTLSITEFADMLSGNAGGFRSRSSSVGSSSSYPISPAVSRTQLASWSDPT
EETGPVAGILDTETLEKVSITEAMHRNLVDNITGQRLLEAQACTGGIIDPNTGERFPVTEAVNKGLVDKIMVDRINLAQKAFCGFEDPRTKTK
MSAAQALKKGWLYYEAGQRFLEVQYLTGGLIEPDTPGRVPLDEALQRGTVDARTAQKLRDVSAYSKYLTCPKTKLKISYKDALDRSMVEEGTG
LRLLEAATQSSKGYYSPYSVSGSGSTTGSRSGSRTGSRAGSRRGSFDATGSGFSMTFSSSSYSSSGYGRRYASGPTSSLGGPESTAA
(SEQ ID NO: 153)
>sp|Q63258-2|ITA7_RAT Isoform Alpha-7X1A of Integrin alpha-7 OS = Rattus norvegicus
OX = 10116 GN = Itga7
MARIPRCDFLGLPGICYLLSFLLAGLLLPRASAFNLDVMGAIRKEGEPGSLFGFSVALHRQLQPRPQSWLLVGAPQALALPGQQANRTGGLFA
CPLSLEETDCYRVDIDRGANVQKESKENQWLGVSVRSQGAGGKVVTCAHRYESRQRVDQVLETRDVIGRCFVLSQDLAIRDELDGGEWKFCEG
RPQGHEQFGFCQQGTAATFSPDSHYLIFGAPGTYNWKGLLFVTNIDSSDPDQLVYKTLDPADRLTGPAGDLTLNSYLGFSIDSGKGLMRSEEL
SFVAGAPRANHKGAVVILRKDSASRLIPEVVLSGERLTSGFGYSLAVTDLNSDGWADLIVGAPYFFERQEELGGAVYVYMNQGGHWADISPLR
LCGSPDSMFGISLAVLGDLNQDGFPDIAVGAPFDGDGKVFIYHGSSLGVVTKPSQVLEGEAVGIKSFGYSLSGGLDVDGNHYPDLLVGSLADT
AALFRARPVLHVSQEIFIDPRAIDLEQPNCADGRLVCVHVKVCFSYVAVPSSYSPIVVLDYVLDGDTDRRLRGQAPRVTFPGRGPDDLKHQSS
GTVSLKHQHDRVCGDTVFQLQENVKDKLRAIVVTLSYGLQTPRLRRQAPDQGLPLVAPILNAHQPSTQRTEIHFLKQGCGDDKICQSNLQLAQ
AQFCSRISDTEFQALPMDLDGTALFALSGQPFIGLELTVTNLPSDPARPQADGDDAHEAQLLATLPASLRYSGVRTLDSVEKPLCLSNENASH
VECELGNPMKRGTQVTFYLILSTSGITIETTELKVELLLATISEQDLHPVSVRAHVFIELPLSISGVATPQQLFFSGKVKGESAMRSERDVGS
KVKYEVTVSNQGQSLNTLGSAFLNIMWPHEIANGKWLLYPMRVELEGGQGPEKKGICSPRPNILHLDVDSRDRRRRELGQPEPQEPPEKVEPS
TSWWPVSSAEKRNVTLDCAQGTAKCVVESCPLYSFDRAAVLHVWGRLWNSTFLEEYMSVKSLEVIVRANITVKSSIKNLLLRDASTVIPVMVY
LDPVAVVAEGVPWWVILLAVLAGLLVLALLVLLLWKCGFFRRNSPSSSFPANYHRAHLAVQPSAMEAGGPGTVGWDSSSGRSTLRPLYPSTTQ
(SEQ ID NO: 154)
>tr|A0A140T8D2|A0A140T8D2_BOVIN Integrin beta OS = Bos taurus OX = 9913 GN = ITGB1 PE = 1
SV = 1
MNLQLIFWIGLISSVCCVFGQADENRCLKANAKSCGECIQAGPNCGWCTNSTFLQEGMPTSARCDDLEALKKKGCHPNDIENPRGSKDIKKNK
NVTNRSKGTAEKLQPEDITQIQPQQLVLQLRSGEPQTFTLKFKRAEDYPIDLYYLMDLSYSMKDDLENVKSLGTDLMNEMRRITSDFRIGFGS
FVEKTVMPYISTTPAKLRNPCTNEQNCTSPFSYKNVLSLTDKGEVFNELVGKQRISGNLDSPEGGFDAIMQVAVCGSLIGWRNVTRLLVFSTD
AGFHFAGDGKLGGIVLPNDGQCHLENDVYTMSHYYDYPSIAHLVQKLSENNIQTIFAVTEEFQPVYKELKNLIPKSAVGTLSANSSNVIQLII
DAYNSLSSEVILENSKLPEGVTINYKSYCKNGVNGTGENGRKCSNISIGDEVQFEISITANKCPNKNSETIKIKPLGFTEEVEIILQFICECE
CQGEGIPGSPKCHDGNGTFECGACRCNEGRVGRHCECSTDEVNSEDMDAYCRKENSSEICSNNGECVCGQCVCRKRDNTNEIYSGKFCECDNF
NCDRSNGLICGGNGVCKCRVCECNPNYTGSACDCSLDTTSCMAVNGQICNGRGVCECGACKCTDPKFQGPTCEMCQTCLGVCAEHKECVQCRA
FNKGEKKDTCAQECSHFNITKVENRDKLPQPGQVDPLSHCKEKDVDDCWFYFTYSVNGNNEATVHVVETPECPTGPDIIPIVAGVVAGIVLIG
LALLLIWKLLMIIHDRREFAKFEKEKMNAKWDTQENPIYKSPINNFKNPNYGRKAGL (SEQ ID NO: 155)
>sp|P07228|ITB1_CHICK Integrin beta-1 OS = Gallus gallus OX = 9031 GN = ITGB1 PE = 1 SV = 1
MAETNLTLLTWAGILCCLIWSGSAQQGGSDCIKANAKSCGECIQAGPNCGWCKKTDFLQEGEPTSARCDDLAALKSKGCPEQDIENPRGSKRV
LEDREVTNRKIGAAEKLKPEAITQIQPQKLVLQLRVGEPQTFSLKFKRAEDYPIDLYYLMDLSYSMKDDLENVKSLGTALMREMEKITSDFRI
GFGSFVEKTVMPYISTTPAKLRNPCTGDQNCTSPFSYKNVLSLTSEGNKFNELVGKQHISGNLDSPEGGFDAIMQVAVCGDQIGWRNVTRLLV
FSTDAGFHFAGDGKLGGIVLPNDGKCHLENNMYTMSHYYDYPSIAHLVQKLSENNIQTIFAVTEEFQAVYKELKNLIPKSAVGTLSSNSSNVI
QLIIDAYNSLSSEVILENSKLPKEVTISYKSYCKNGVNDTQEDGRKCSNISIGDEVRFEINVTANECPKKGQNETIKIKPLGFTEEVEIHLQF
ICDCLCQSEGEPNSPACHDGNGTFECGACRCNEGRIGRLCECSTDEVNSEDMDAYCRRENSTEICSNNGECICGQCVCKKRENTNEVYSGKYC
ECDNFNCDRSNGLICGGNGICKCRVCECFPNFTGSACDCSLDTTPCMAGNGQICNGRGTCECGTCNCTDPKFQGPTCEMCQTCLGVCAEHKDC
VQCRAFEKGEKKETCSQECMHFNMTRVESRGKLPQPVHPDPLSHCKEKDVGDCWFYFTYSVNSNGEASVHVVETPECPSGPDIIPIVAGVVAG
IVLIGLALLLIWKLLMIIHDRREFAKFEKEKMNAKWDTGENPIYKSAVTTVVNPKYEGK (SEQ ID NO: 156)
Sus scrofa (Pig)
>sp|Q9GLP0|ITB1_PIG Integrin beta-1 OS = Sus scrofa OX = 9823 GN = ITGE1 PE = 2
SV = 1
MNLQLIFWIGLISSVCYVFGQADENRCLKANAKSCGECIQAGPNCGWCTNSTFLQEGMPTSARCDDLEALRKKGCHPDDIENPRGSKNIKKNK
NVTNRSKGTAEKLQPEDITQIQPQQLVLQLRSGEPQTFTLKFKRAEDYPIDLYYLMDLSYSMKDDLENVKSLGTDLMNEMRRITSDFRIGFGS
FVEKTVMPYISTTPAKLRNPCTSEQNCTSPFSYKNVLSLTDKGEVFNELVGKQRISGNLDSPEGGFDAIMQVAVCGSLIGWRNVTRLLVFSTD
AGFHFAGDGKLGGIVLPNDGHCHLENDVYTMSHYYDYPSIAHLVQKLSENNIQTIFAVTEEFQPVYKELKNLIPKSAVGTLSANSSNVIQLII
DAYNSLSSEVILENSKLPEGVTINYKSYCKNGVNGTGENGRKCSNISIGDEVQFEISITANKCPNKNSETIKIKPLGFTEEVEIILQFICECE
CQSEGIPSSPKCHDGNGTFECGACRCNEGRVGRHCECSTDEVNSEDMDAYCRKENSSEICTNNGECVCGQCVCRKRDNTNEIYSGKFCECDNF
NCDRSNGLICGGNGVCKCRVCECNPNYTGSACDCSLDTTSCMAVNGQICNGRGVCECGVCKCTDPKFQGPTCEMCQTCLGVCAEHKECVQCRA
FNKGEKKDTCAQECSHFNITKVENRDKLPQPGQVDPLSHCKEKDVDDCWFYFTYSVNGNNEATVHVVETPECPTGPDIIPIVAGVVAGIVLIG
LALLLIWKLLMIIHDRREFAKFEKEKMNAKWDTGENPIYKSAVTTVVNPKYEGK (SEQ ID NO: 157)
>tr|F1MX12|F1MX12_BOVIN Ankyrin repeat domain 2 OS = Bos taurus OX = 9913 GN = ANKRD2 PE = 4
SV = 2
WQKHLAGRGWGPWHIKPPGPAEAGCDGTMADSEEVQRATALIEERLAQEEENEKLRGTTHQKLPMEMLVLEDEKHHRPESPSLQKVKGQERVR
KTSLDLRREIIDVGGIQNLIQLRKKRKQKKREALAASQEPPPEPEEITGPVDEETFLKAAVEGKMKVIEKFLADGGSPDTCDQFRRTALHRAS
LEGHMEILEKLLESGATVDFQDRLDCTAMHWACRGGHLEVVRLLQSRGADTNVRDKLLSTPLHVAVRTGQVEIVEHFLSLGLDINAKDREGDS
ALHDAVRLNRYKIIKLLLLHGADMMSKNLAGKTPTDLVQLWQADTRHALENPEPGSEQNGLEGSTESGRETPQPVAAE
(SEQ ID NO: 158)
>tr|F1NG08|F1NG08_CHICK Ankyrin 2 OS = Gallus gallus OX = 9031 GN = ANK2 PE = 4 SV = 3
MAAPAPPAPGGGTSPPAGPPRLRQSDSNASFLRAARAGNLDKVVEYLKSGIDINTCNQNGLNALHLAAKEGHVGLVQELLERGSAVDSATKKG
NTALHIASLAGQAEVVKVLVKEGANINAQSQNGFTPLYMAAQENHIEVVKYLLENGANQSTATEDGFTPLAVALQQGHNQAVAILLENDTKGK
VRLPALHIAARKDDTKSAALLLQNDENADVQSKMMVNRTTESGFTPLHIAAHYGNVNVATLLLNRGAAVDFTARNGITPLHVASKRGNTNMVK
LLLDRGGQIDAKTRDGLTPLHCAARSGHDQVVELLLERGAPLLARTKNGLSPLHMAAQGDHVECVKHLLQHKAPVDDVTLDYLTALHVAAHCG
HYRVTKLLLDKRANPNARALNGFTPLHIACKKNRIKVMELLVKYGASIQAITESGLTPIHVAAFMGHLNIVLLLLQNGASPDVTNIRGETALH
MAARAGQVEVVRCLLRNGALVDARAREEQTPLHIASRLGKTEIVQLLLQHMAHPDAATTNGYTPLHISAREGQVDVASVLLEAGASHSMSTKK
GFTPLHVAAKYGSLEVAKLLLQRRASPDSAGKNGLTPLHVAAHYDNQKVALLLLEKGASPHATAKNGYTPLHIAAKKNQMQIATTLLNYGAET
NILTKQGVTPLHLASQGGHTDMVTLLLEKGSNIHVATKTGLTSLHLAAQEDKVNVAEILTKHGANQDAQTKLGYTPLIVACHYGNIKMVNFLL
KQGANVNAKTKNGYTPLHQAAQQGHTHIINVLLQHGAKPNAITTNGNTALAIARRLGYISVVDTLKVVTEEITTTTTTVTEKHKLNVPETMTE
VLDVSDEEAFKHSDDERFSDGEVYNGTGVISRNSWSDDTMTGDGGEYLRPEDLKELGDDSLPSSQFLDGMNYLRYSLEGGRSDSLRSFSSDRS
HTLSHASYLRDSAMIDDTVVIPSQQVTTLAKEAERNSYRLSWGPENLDNVALSSSPIHSGCSSPCLDHDNSSFLVSFMVDARGGAMRGCRHNG
LRIIIPPRKCTAPTRVTCRLVKRHRLATMPPMVEGEGLASRLIEVGPSGAQFLGPVIVEIPHFAALRGKERELVILRSENGDSWKEHFCEYTE
DELNEILNGMDEVLDTPEELEKKRICRIITRDFPQYFAVVSRIKQDSNLIGPEGGVLSSTVVPQVQAVFPEGALTKRIRVGLQAQPMHTELIK
KILGNKATFSPIVTLEPRRRKFHKPITMTIPVPKASSDGIMNGYGGDTPTLRLLCSITGGTTPAQWEDITGTTPLTFVNECVSFTTNVSARFW
LIDCRQTQESVTFASQVYREIICVPYMAKFVVFAKSHDPIEARLRCFCMTDDKVDKTLEQQENFAEVARSRDVEVLEGKPIYVDCFGNLVPLT
KSGQHHIFSFFAFKENRLPLFVKVRDTTQEPCGRLSFMKEPKSTRGLVHQAICNLNITLPVYTKESESDQEQEEEVDMTSEKNQQDDRERTEE
RLAHIADHLGFSWTELARELDFTEEQIHQIRIENPNSLQDQSHALLKYWLERDGKHATDTSLTQCLTKINRMDIVHLMETSGIDSMQVHGTRT
YTEIEQTIGLDHSEGFSVLQEELYSSRHKPDERHRISKDGDPTEHPPIVSEEDVSVSYSPFQDSTPRSEAELSMAELLRQTHKEQVEAEFSGK
PQDVIETTSSQHEYFVTTPGTEQRAASDTSARFSATKEEREKTSPQSPSSAQRGGSPIIQEPEELHLHQDDPSPRRTSLVIVESIDEQPEKLG
SGYEEESLEKELAEELGELENSSDEDEMVTTRVVRRRVIIQADSMPEMPPETVTEEQYTDEHGHTVVKKVTRKIIRRYVSPDGTEKEDIIMQG
TPQKPVTVEEGDGYSKVVKRVVLKSDSEQSEVTLSEPGVLPSASNFQSEPVEGRKVSKVIKTTVVQGERMEKHLGDASLATDLPSAKEDFEEA
LSYTGNQIKIQLPALVEKEIMKEDGSIIKRTTLSKASTQKRTVMKDRYGKHVHIEELDDTPEALPQDDLQHDLQQLLRHFCKEDWKQEAK
(SEQ ID NO: 159)
>tr|A0A287AUI5|A0A287AUI5_PIG Ankyrin 2 OS = Sus scrofa OX = 9823 GN = ANK2 PE = 1 SV = 1
EGQSQDKGSKSGSSIQSLFFFSQSDSNASFLRAARAGNLDKVVEYLKGGIDINTCNQNGLNALHLAAKEGHVGLVQELLGRGSSVDSATKKGN
TALHIASLAGQAEVVKVLVKEGANINAQSQNGFTPLYMAAQENHIDVVKYLLENGANQSTATEDGFTPLAVALQQGHNQAVAILLENDTKGKV
RLPALHIAARKDDTKSAALLLQNDHNADVQSKMMVNRTTESGFTPLHIAAHYGNVNVATLLLNRGAAVDFTARNGITPLHVASKRGNTNMVKL
LLDRGGQIDAKTRDGLTPLHCAARSGHDQVVELLLERGAPLLARTKNGLSPLHMAAQGDHVECVKHLLQHKAPVDDVTLDYLTALHVAAHCGH
YRVTKLLLDKRANPNARALNGFTPLHIACKKNRIKVMELLVKYGASIQAITESGLTPIHVAAFMGHLNIVLLLLQNGASPDVTNIRGETALHM
AARAGQVEVVRCLLRNGALVDARAREEQTPLHIASRLGKTEIVQLLLQHMAHPDAATTNGYTPLHISAREGQVDVASVLLEAGAAHSLATKKG
FTPLHVAAKYGSLDVAKLLLQRRAAADSAGKNGLTPLHVAAHYDNQKVALLLLEKGASPHATAKNGYTPLHIAAKKNQMQIASTLLNYGAETN
IVTKQGVTPLHLASQEGHTDMVTLLLDKGANIHMSTKSGLTSLHLAAQEDKVNVADILTKHGADQDAHTKLGYTPLIVACHYGNVKMVNELLK
QGANVNAKTKNGYTPLHQAAQQGHTHIINVLLQHGAKPNATTANGNTALAIAKRLGYISVVDTLKVVTEEVTTTTTTITEKHKLNVPETMTEV
LDVSDEEGDDTMTGDGGEYLRPEDLKELGDDSLPSSQFLDGMNYLRYSLEGGRSDSLRSESSDRSHTLSHASYLRDSAMIDDTVVIPSHQVSA
LAKEAERNSYRLSWGTENLDNVALSSSPIHSGFLVSFMVDARGGAMRGCRHNGLRIIIPPRKCTAPTRVTCRLVKRHRLATMPPMVEGEGLAS
RLIEVGPSGAQFLGKLHLPTAPPPLNEGESLVSRILQLGPPGTKFLGPVIVEIPHFAALRGKERELVVLRSENGDSWKEHYCEYTEDELNEIL
NGMDEVLDSPEDLEKKRICRIITRDFPQYFAVVSRIKQDSNLIGPEGGVQAVFPEGALTKRIRVGLQAQPMHSELVKKILGNKATFSPIVTLE
PRRRKFHKPITMTIPVPKASSDVMLNGFGGDAPTLRLLCSITGGTTPAQWEDITGTTPLTFVNECVSFTTNVSARFWLIDCRQIQESVTFASQ
VYREIICVPYMAKFVVFAKSHDPIEARLRCFCMTDDKVDKTLEQQENFAEVARSRDVEVLEGKPIYVDCFGNLVPLTKSGQHHIFSFFAFKEN
RLPLEVKVRDSTQEPCGRLSFMKEPKSTRGLVHQAICNLNITLPIYTKESESDQEQEEEVIVRHYDETESTETSVLKSHLVNEVPVLASPDLL
SEVSEMKQDLIKMTAILTTDVSDRAGSLKVKELVKAAEEEPGEPFEIVERVKEDLEKVNEILRSGTCAGDEGSEPRSQPEREVVEEEWVIVSD
EEIEEAKRKAPLEITEYPCVEVRLDKDTKVKVEKDSLGLVNYLTEDLNSYVPPHGEPLQMEREKQEALGPGRSSESEGKDAPSEETQSTQKQP
KPSLGIKKPVRRKLKDKQKQKEDSSQASADKSELKKGSSEESLDEDTGLAPEPLPAVKATSPLIEETPIGSIKDKVKALQKRVEDEQKGRSKL
PVRVKGKEDVPKKITHRTQLAASPSLKSERHALASKPERHSSLSSPAKTERHPPVSPSSKTEKHSPVSPSAKTERHSPVSSSSKTEKHSPVSP
STKPDRHSPVSSATKTERHPPVSPSGKTDKRPPVSPSGRTEKHPPVSPGRTEKRLPVSPAGRMERHSPMSTSGKTEKHLPVSPSGKTDKQPPV
SPTSKTERIEETMSVRELMKAFQSGQDPSKHKTGLFEHKSAKQKQPQEKGKVRGEKEKGLTVTQKETQKTETQTIKRSQRFLVTGPQNPEEQP
VVKREEGAGERGKALNHKTPEPVQSAPEEESHKVESPKEKLADEQGDMDLQISPDRKTSTDFSDVIKQELEDNDKYQEFCHNQVLTSPFNTTF
PLDYMKEEFLPALSLQSGALDGSSESLKHEGAAGSPCGSLMEGTPQISSEESYKHEGLAETPETSPESLSFSPKKTEEQTEETKETTKVESPP
EIHSEKEDPSTKDVTDSSAGQGAVVTGGTEPSAECLLKEATLEPSKDTCPQPEDEGLDSQGESLAKETPKGLTEGVPHGEDPLTHVSSAHEKQ
TDTEAQKSTASKPSDETAASPLPDAVVKTSPGTESKPQGVIRSPQGLELALPSRDSEVFSPGADESFAVSHKDSLEASPVLEDNSSHKTPDSL
EPSPLKESPCRDSLESSPVEPKMKAGILPSQFPLPSAVAKTELITEVASMRSRLLRDPDGSAEDDSLEQTSLMESSGKSPLSPDTPSSEEISY
EVTPKTTDAGTPKPAVIPECAEEDDLENGEKKRFTPEEEMFKMVTKIKISKQKRDYKKEPKQEDSSSSSDADVECSADLDEPKCMESVEDKSN
APVVVTAESRKASSSSESEPELTQLKKGADSGLLPEPVIRVQPPSPLPSSIDSNSSPEEVQFQPIVSKQYTFKMNEDTQEDSGKSEEEEGCES
HLPEDSHTVSTSGPEMSYDDVNRDADQPKICGSYGCEAESPSSSAIPVTLGLHSSTGEDVHEQLVIHKEPLALQDTGEKDTEGEELDVSRVEA
PQVGYPTESSSSSSSLPHCPASEGKELDEDVVSTSSATKMEVTKADQAFESLPDDYSTQDLPNTTQTDSSSLDVPVSDPTETDDISDPQVTSP
YENVPSQSFFSSEESKTQTDTRHTSFHSSEVCSVTTTSSVEEVVVTSSSGRTVSSQESNLEDQNLECKQESPLCEVQPDGAPSSLEPAAPTTS
TVVGEQISKVIITKTDVDSDSWSEIREDDEAFEARVKEEEQKIFGLMVDRQSQGTTPDTTPARTPTEEGTPTSEQNPFLFQEGKLFEMTRSGA
IDMTKRSYGDESFHFFQIGQESREETLTEDMKEGGTGTELPQLETSAESLAPLESKETVNDEADLVPDDLSEEVEEVPTSDGQLNSQMGISAS
TETSMKEAASAGAEDLPCIQMSDTPSLSLVKQAALQLDFSTVTRSVYSDRDDESPDSSPEEQKSVIEIPTAPMENVPSTESRSKIPVRTMPTS
TPAFPSMECESAPSEGFLPSLDEESQEDETKPKSKIPVKAPVPRVEQQLLHLDSSLQETVAPQGQDVTSRAPDSRSKSESDASPLDAKITCPE
KTGSYTETDLESSEGTEELELESEDETTRPKIFASRLPVKSKSTTSSCRGATSPTKESKEHFFDLYRNSIEFFEEISDEASKLVDRLTQSERE
QELVSDDESSSALEVSVIENLPPVETEQSIPEDIFDTRPIWDESIETLIERIPDENGHDHAEDQQDEQERIEERLAYIADHLGFSWTELAREL
DFTEEQIHQIRIENPNSLQDQSHALLKYWLERDGKHATDTNLIECLTKINRMDIVHLMETITEPLQERISHSYAEIEQTITLDHSEGFSVLQE
ELCTAQNKQKEEQAASKEGESYDHPPIVSEEDISVGYSTFQDSIPKTEGDGSVTELLPKTHEEQVQQDFSGKMQDLPEESSLEQQEYFVTTPG
TEASETPKATAAPGSPSKTPEEIITPPEEERPYLQTPTASEQGDSPIVQEPEEPPEHREASLPQKTSLVIVESADDQPQTFERLDEDAAFQKG
DDMPDIPPETVTEEEYVDEHGHTVVKKVTRKIIRRYVSSDGTEKEEMTMQGAPQDPISIEEGDGYSKVIKRVVLKSDTERSEVRADFVERCK
(SEQ ID NO: 160)
>sp|P49024|PAXI_CHICK Paxillin OS = Gallus gallus OX = 9031 GN = PXN PE = 1 SV = 1
MDDLDALLADLESTTSHISKRPVFLTEETPYSYPTGNHTYQEIAVPPPVPPPPSSEALNGTVIDPLDQWQPSVSRYGHQQPQSQSPIYSSSAK
SSSASVPRDGLSSPSPRASEEEHVYSFPNKQKSAEPSPTMTSTSLGSNLSELDRLLLELNAVQHNPPSGFSADEVSRSPSLPNVTGPHYVIPE
SSSSAGGKAAPPTKEKPKRNGGRGIEDVRPSVESLLDELESSVPSPVPAITVSQGEVSSPQRVNASQQQTRISASSATRELDELMASLSDFKF
MAQGKAGGSSSPPSTTPKPGSQLDTMLGSLQSDLNKLGVATVAKGVCGACKKPIAGQVVTAMGKTWHPEHFVCTHCQEEIGSRNFFERDGQPY
CEKDYHNLFSPRCYYCNGPILDKVVTALDRTWHPEHFFCAQCGVFFGPEGFHEKDGKAYCRKDYFDMFAPKCGGCARAILENYISALNTLWHP
ECFVCRECFTPFINGSFFEHDGQPYCEVHYHERRGSLCSGCQKPITGRCITAMGKKFHPEHFVCAFCLKQLNKGTFKEQNDKPYCQNCFLKLF
C (SEQ ID NO: 161)
>tr|F1MFD1|F1MFD1_BOVIN Paxillin OS = Bos taurus OX = 9913 GN = PXN PE = 1 SV = 2
ALLADLESTTSHISKRPVFLSEETPYSYPTGNHTYQEIAVPPVPPPPSSEALNGSVLDPLDPWPPSTSRFTHQQPQSSSPVYGSSAKTSSASN
PQDGGGPPCPRAGEEDHVYSFPNKQKSAEPSPTVMSSSLGSNLSELDRLLLELNAVQHNPPGFPADEANSSPPLPGPLSTHYGVPENNSLLGG
KAGALTKEKPKRNGGRGLEDLRPSVENLLDELESSVPSPVPTITVNQGEMSSPQRVTSSQQQTRISASSATRELDELMASLSDLSKIQDLEQR
ADGELCWAAGWPLNGRQSGPEGQDMGGFMAQGKTGSSSPPGGPPKPGSQLDSMLGSLQSDLNKLGVATVAKGVCGACKKPIAGQVVTAMGKTW
HPEHFVCTHCQEEIGSRNFFERDGQPYCEKDYHNLFSPRCYYCNGPILDKVVTALDRTWHPEHFFCAQCGAFFGPEGFHEKDGKAYCRKDYFD
MFAPKCGGCARAILENYISALNTLWHPECFVCRECFTPFVHGSFFEHEGQPYCEAHYHERRGSLCSGCQKPITGRCITAMAKKFHPEHFVCAF
CLKQLNKGTFKEQNDKPYCQNCFLKLFC (SEQ ID NO: 162)
>tr|A0A287BTJ4|A0A287BTJ4_PIG Paxillin OS = Sus scrofa OX = 9823 GN = PXN PE = 4 SV = 1
DALLADLESTTSHISKRPVFLSEETPYSYPTGNHTYQEIAVPPPVPPPPSSEALNGSVLDPIDQWQPSTSRFIHQQPQAPSPVYGSSAKTSSS
SNPQDGIGLPCPRASEEEHVYSFPNKQKSAEPSPTVMSSSLGSNLSELDRLLLELNAVQHNAPGFPTDEANSSPPLPGALSPHYGVLEHNSSL
GGKAGPVTKEKPKRNGGRGLEDVRPSVESLLDELESSVPSPVPAITLNQGEMNSPQRVTSSQQQTRISASSATRELDELMASLSDFKFMAQGK
TGSSSPPGGPPKPGSQLDSMLGSLQSDLNKLGVATVAKGVCGACKKPIAGQVVTAMGKTWHPEHFVCTHCQEEIGSRNFFERDGQPYCEKDYH
NLFSPRCYYCNGPILDKVVTALDRTWHPEHFFCAQCGAFFGPEGFHEKDGKAYCRKDYFDMFAPKCGGCARAILENYISALNTLWHPECFVCR
ECFTPFVNGSFFEHDGQPYCEVHYHERRGSLCSGCQKPITGRCITAMAKKFHPEHFVCAFCLKQLNKGTFKEQNDKPYCQNCFLKLFC
(SEQ ID NO: 163)
>tr|O57613|O57613_CHICK Paranemin OS = Gallus gallus OX = 9031 PE = 2 SV = 2
MLSMEGFVGARALGEESLQMWDLNKRLEAYLARVKFLEEENEGLRAEIQSTKENPAGDPRRARYEEELRSLRDALHRAFTEKCAAELARDNLY
EEVQHVRSRCQKEQAAREEAKRQLSSSKKELEEERRAQIWLKERAVQLEKEVEALLEVHEEEKAGLDQELASFSQSLEGFRCAPVAFQPVEVE
DYSKRLSEIWRGAVETYKAEVSQLERALGQAKENLWQVAEDNQQSQLQLRHLEKELVGLKVRKEMLEESLGQQWQEQHGEAEKFQLAIEALEQ
EKQSLQVQIAQVLEDRQQLMHLKMSLSLEVATYRTLLEAESTRLQMPPGEFKLANSLRDVKLEASSSKHRASLAAFPRPEGVAQLCRTPGDAL
KVLTPKSKSSSALEFQKISSVLQAPRSWEPAAPSPTVPVVSPEPGSGGAESPVHECGAGKESPMLSPLSPEQLVNHALQDALKEMQDDAEAKE
VPTLSATQSTRDGDLEATMEEEEAAGTQGVGAEGETVSPPGLCFCSNEPTLLSATQSDVESQEEMWEEERSKEEMLNPLSSMESQEPGGEPWG
GVTRRSRLQVGKEDMEATSTEALHISEKKEQREIWSPSREDEECEFPDEEREMQEEGSLQMEIEAACAVPVGSHPVLPTGIHLQEDFLEREQE
SEHQETSLGELGAAAGEEREQEVCQELKASSIEEAMPAAEGSSGSGEGTTGRESTGRARDDEGEEEDKGREALGEDDLQAGEALGAKELGKES
MGLEEAEGMWEESVDLQEEHRDLQEGHGDLQVEHEDLWEEHGHIQEEHGDTQEEYGDTQEEHGDLQVEGGDLQEEHGDTQEEHGDLQEEHGDT
QEEHGDLQVEHEDLQVEHGDLWEEHRDVQEEHGDTQEEYGDTQEEHGDLQVEGGDLQEEHGDTQEEHEDLQEEHGDTQEEHGDLQVEHGDLQE
EHRDLQEGHGDLKEEHGDLQVEHEDLQVEHGDLQEEHGDTQEEHGDLQEEHGDLQVEHEDLQVEHGDLQVEHGDLQEEHGDTQEEHRDLQEVH
GDQQEEHRDLQEGHGDLQEEHGDLQVEHGDLQEEYGDTQEEHRDLQEVHGDQQEEHRNLQEGHGDLQEGHGDLQEEHGDLWKEHGVLKEEHGD
LQEGHGDLQEESGDPQEEPGEPWVQHGEQGSAGDGLEQDMVLQPGEGAWGREDNDISQKQQAQDWEGTAEDEEETGVNTITSQEPTQVDDNPH
AEAAENEERDVTSPTAMEETQEGEDEGDAGSEVQSQQQPQDTPGQEAEPAPGQKEVRYGDTGEAPGDPQEPAEALEVEDEELSSEPIELERGS
PDTAVMQQDLGNGAESDEPMEEDFQSEDAQLEEPKACRMELEDTLLNSTPLCAYSGEMLESDPNPPSSGGDGEAAPEMAQEEEGDLRGSDEAA
VHAEPESCEELSPAPECTEEEEGYFIVSAPSQEGSSMEEAENSEEFEEIKVEAAEDRKDELTAPGVASLVPEDEGHSEPFVGEAEDVKMPLGE
FEMPKEEDEEDAGGFAAELEEGLTVPVAEGLSEGHTDKTTLGDEGLGEEDVQDGDNPPATETSDTDPSNTDPPPGTMLEHGAGMEAAEYLPDV
PTQLPVDIMKDSDILEIVEQALEFNQELVLGAKLAKDGQEEDGDAQPPQEEEGGSSPTSSCDEQPTVQEAVAEPERTKNGEQNGLHRQASLED
LAEFTEEGLNGITHPGEAPAAHTLPLPSKHSGAEPVPELSPLQTTSCARSRSPGPLGRSDAVGPHSPATIGRLP (SEQ ID NO: 164)
>tr|E7EYD0|E7EYD0_DANRE Myomesin 1a (skelemin) OS = Danio rerio OX = 7955 GN = myom1a
PE = 4 SV = 1
MSESLKLQKEQEERDLETRYESSYHQSSLSSVSRQSYTAYVSSHGHKISGKKKEKKLTPLSKKEKRSYLAVDKEDEVIGYVVPVFRSSHLATQ
DLMETQEEVKEEGVGYVVMRNLFARESGFKMRTVKKTRETSMRESAERMALSQKLHEKEQFQKKMNPDSLTHPPEFIVKPRGQTVWEGKSVTL
HCTVAGWPKPRVAWYKNNVLIDAKARPEKYFTESQYNMHSLEIKNCTFSDTAEYRISALNVKGESSAFAPVIIKRFKEEEELVERPHGYSPEY
GVTENTTIIDKFDVSFGREGETMSLGCTVIVYPTVKRYQPEIVWYRNGVALSSSKWVHMHWSGEKATLTLVHLNKEDEGLYTLRVNTKSGFDT
HSAYVFVRDADVEEEGVPVAPLDVRCHDANKDYVVVTWKQPAVEGSSAITGYFIDRLEVGNHHWTQCNDTPVKYARFPVTGLIEGRSYMFRVR
ALNNAGVSRPSRVSDPVVAMDPSDRARLRAGPSAPWTGVIKFTEEDPTVGVIPGPPTDLAVTEATKSYVVLSWKPPVQRGHEGVMYYVEKCLV
GTDAWQRVNTGIPVKSPRFALFDLAEDKSYTFRVRSCNSAGVGEPSEETGATTVGDRLDLPSAPGPVIPIRNTDSSVVVCWGASKEVKDLVGY
YIEVTVDGSGVWAPCNNKPVKGTRFVCHGLNATDKCTFRVKAVNAAGYSGSSAESEACLVKASIAVPSPPTGVTTLERLRDYMVIGWQAPAKT
GGADIRGYYLDYRTVKDGVTSKWHELNLKAVTSSPYKVTDLKENEFYQFQVRAFNQAGISEASIPTAPLECKEWTVAVPGPPHGLRVQEVRKD
SMVVLWEPPTFNGRSPVTGYYVDFKEENGRWRCVQERSTKHTYMKVSGLQEGISYRLRIHAKNLAGVGVPSKATDAILAETRPGTNEIVVDVD
DNGVISLIFECSDLKEDSQFVWSKNYEAFTDSSRLTIQTTGGKSRAIFNDPSLDDLGIYSCVVTNTDGVSASYTLTEEGLKRLLDISHDHQFP
IIPFKSEMAIELQEKGRVRFWAEVGKFTSNLQVEYVFNDNVIHEGKKYTMNFNKSTGIIEMFMDLLEVTDEGTFTFNLVDGKATGRTSLVLIG
EEFAELQKKSEFERAEWVRRQGPHFVEYLSFEVTPECDVHLKCKVGNIKPATEIAWFKDGIEIEEDDEDAKKIGKSDEVLTFDIGKLVIKSEK
AERKKKPATEESPSKPKISKKDAGVYEVKLKDERGKDKTLLNLTDAGYQAVLNEVFRVIANSSTELKVMSTEHGIILYSFVVHYLEDLRVGWL
HKESKISHSDRVQCGVTGEQLWLKINEPTEKDKGKYAIDIFDGKGSVKRVLDLSGQVWEEAFEEFKRLKAAAIAERNRARVVGGLPDVVTIQE
GKSLNLTGNVWGDPAPEVSWIKNEKPLVCDEHHTLKYEHSKFASITIAAVTTTDSGKYALLVKNKYGTEAAEFTVSVYIPEDEAEKKE
(SEQ ID NO: 165)

1. A food composition, wherein said food composition is formulated for a companion animal, and wherein the food composition comprises at least one recombinant animal protein.

2. The food composition of claim 1, wherein the food composition is substantially free of antibiotics, animal growth hormones, and processed animal meat.

3. The food composition of claim 1, wherein the at least one recombinant animal protein is a recombinant animal muscle protein.

4. The food composition of claim 3, wherein the at least one recombinant animal muscle protein is selected from the animal muscle proteins in Table 1.

5. The food composition of claim 1, wherein the food composition comprises at least two recombinant animal muscle proteins.

6. The food composition of claim 1, wherein at least one recombinant animal muscle protein comprises a modified amino acid sequence, wherein said modification is relative to the naturally occurring sequence of the animal muscle protein.

7. The food composition of claim 6, wherein said modified recombinant animal muscle protein comprises an amino acid sequence at least 80% identical to a sequence in Table 1.

8. The food composition of claim 6, wherein said modified recombinant animal muscle protein is a truncated form of a sequence in Table 1.

9. The food composition of claim 6, wherein said modified recombinant animal muscle protein comprises a heterologous signal peptide.

10. The food composition of claim 1, wherein the food composition consists of 5% to 95% recombinant animal protein, on a mass percentage basis.

11. The food composition of claim 10, wherein the food composition consists of 5% to 40% recombinant animal protein, on a mass percentage basis.

12. (canceled)

13. The food composition of claim 10, wherein the food composition consists of 40% to 95% recombinant animal protein.

14. The food composition of claim 10, wherein the food composition consists of 1% to 30% recombinant animal protein.

15. The food composition of claim 10, wherein the food composition is formulated for a dog or a cat.

16. (canceled)

17. A method for preparing the food compositions of claim 1, wherein the method comprises recombinantly expressing the at least one recombinant animal protein in a prokaryotic host organism.

18. The method of claim 17, wherein the prokaryotic host organism is a bacterial cell.

19. (canceled)

20. (canceled)

21. The method of claim 17, further comprising mixing the at least one recombinantly expressed animal protein with one or more food components selected from the group consisting of sodium, potassium, fat, carbohydrate, and dietary fiber, and then forming the mixture into a food composition suitable for consumption by an animal.

22. The method of claim 21, wherein at least two animal proteins are recombinantly expressed in a prokaryotic host and isolated prior to mixing with the one or more food components.

23. The method of claim 17, wherein the recombinantly expressed protein is not isolated from the host organism prior to mixing with other components in the food composition.

24. (canceled)

25. A food composition, wherein said food composition is formulated for a human, and wherein the food composition comprises at least one recombinant animal muscle protein.

The application's sequence listing, which the Patent Office published only in electronic form, follows.

SEQUENCE LISTING (165 sequences)

SEQ ID NO: 1 - protein, 377 aa, Bos taurus
MCDEDETTALVCDNGSGLVKAGFAGDDAPRAVFPSIVGRPRHQGVMVGMGQKDSYVGDEAQSKKGILTLKYPIEHGIITNWDDMEKIWHHTFYNELRVAPEEHPTLLTEAPLNPKANREKMTQIMFETFNVPAMYVAIQAVLSLYASGRTTGIVLDSGDGVTHNVPIYEGYALPHAIMRLDLAGRDLTDYLMKILTERGYSFVTTAEREIVRDIKEKLCYVALDFENEMATAASSSSLEKSYELPDGQVITIGNERFRCPETLFQPSFIGMESAGIHETTYNSIMKCDIDIRKDLYANNVMSGGTTMYPGIADRMQKEITALAPSTMKIKIIAPPERKYSVWIGGSILASLSTFQQMWITKQEYDEAGPSIVHRKCF

SEQ ID NO: 2 - protein, 377 aa, Sus scrofa
MCDEDETTALVCDNGSGLVKAGFAGDDAPRAVFPSIVGRPRHQGVMVGMGQKDSYVGDEAQSKRGILTLKYPIEHGIITNWDDMEKIWHHTFYNELRVAPEEHPTLLTEAPLNPKANREKMTQIMFETFNVPAMYVAIQAVLSLYASGRTTGIVLDSGDGVTHNVPIYEGYALPHAIMRLDLAGRDLTDYLMKILTERGYSFVTTAEREIVRDIKEKLCYVALDFENEMATAASSSSLEKSYELPDGQVITIGNERFRCPETLFQPSFIGMESAGIHETTYNSIMKCDIDIRKDLYANNVMSGGTTMYPGIADRMQKEITALAPSTMKIKIIAPPERKYSVWIGGSILASLSTFQQMWITKQEYDEAGPSIVHRKCF

SEQ ID NO: 3 - protein, 377 aa, Gallus gallus; identical to SEQ ID NO: 2

SEQ ID NO: 4 - protein, 377 aa, Bos taurus; identical to SEQ ID NO: 2

SEQ ID NO: 5 - protein, 168 aa, Gallus gallus
MAPKKAKRRAAEGSSNVFSMFDQTQIQEFKEAFTVIDQNRDGIIDKDDLRETFAAMGRLNVKNEELDAMIKEASGPINFTVFLTMFGEKLKGADPEDVIMGAFKVLDPDGKGSIKKSFLEELLTTQCDRFTPEEIKNMWAAFPPDVAGNVDYKNICYVITHGEDKEGE

SEQ ID NO: 6 - protein, 1940 aa, Gallus gallus
MSSDAEMAIFGEAAPYLRKSEKERIEAQNKPFDAKTSVFVVHAKESYVKSTIQSKESGKVTVKTESGETLTVKEDQIFSMNPPKYDKIEDMAMMTHLHEPAVLYNLKERYAAWMIYTYSGLFCVTVNPYKWLPVYNPEVVLAYRGKKRQEAPPHIFSISDNAYQFMLTDRENQSILITGESGAGKTVNTKRVIQYFATIAASGDKKKEEQPAGKMQGTLEDQIISANPLLEAFGNAKTVRNDNSSRFGKFIRIHFGATGKLASADIETYLLEKSRVTFQLKAERSYHIFYQIMSNKKPELIEMLLITTNPYDYHYVSQGEITVPSINDQEELMATDSAIDILGFTPDEKTAIYKLTGAVMHYGNLKFKQKQREEQAEPDGTEVADKAAYLMGLNSADLLKALCYPRVKVGNEFVTKGQTVQQVYNSVGALAKAVFEKMFLWMVVRINQQLDTKQPRQYFIGVLDIAGFEIFDFNSLEQLCINFTNEKLQQFFNHHMFVLEQEEYKKEGIEWEFIDFGMDLAACIELIEKPMGIFSILEEECMFPKATDTSFKNKLYDQHLGKSNNFQKPKPGKGKAEAHFSLVHYAGTVDYNISGWLDKNKDPLYETVVGLYQKSSLKTLALLFASAGGEAESGGGGKKGGKKKGSSFQTVSALFRENLNKLMTNLRSTHPHFVRCIIPNETKTPGAMEHELVLHQLRCNGVLEGIRICRKGFPSRILYADFKQRYKVLNASAIPEGQFIDSKKASEKLLGSIDVDHTQYKFGHTKVFFKAGLLGLLEEMRDEKLAQLITRTQARCRGFLMRVEYRRMVERRESIFCIQYNIRSFMNVKHWPWMKLFFKIKPLLKSAESEKEMANMKGEFEKTKEELAKSGAKRKDLEGKMVSLLQEKNDLQLQVQAEADALADAEERCDQLIKTKIQLEAKIKEVTERAEDEEEINAELTAKKRKLEDECSELKKDIDDLELTLAKVEKEKHATENKVKNLTEEMAALDENIAKLTKEKKAPQEAHQQTLDDLQAEEDKVNTLTKAKTKLEQQVDDLEGSLEQEKKLRMDLERAKRKLEGDLKLAHDSIMDLENDKQQLDEKLKKKDFEISQIQSKIEDEQALGMQLQKKIKELQARTEELEEEIEAERTSRAKAEKHRADLSRELEEISERLEEAGGATAAQIDMNKKREAEFQKMRRDLEEATLQHEATAAALRKKHADSTAELGEQIDNLQRVKQKLEKEKSELKMEIDDLASNMESVSKAKASLEKTCRALEDQMSEIKTKEEEHQRMINDVNAQRARLQTESGEYSRQVEEKDALISQLSRGKQAFTQQIEELKRHLEEEIKAKNALAHGLQSARHDCDLLREQYEEEQEAKGELQRALSKANSEVAQWRTKYETDAIQRTEELEEAKKKLAQRLQDAEEHVEAVNSKCASLEKTKQRLQNEVEDLMIDVERANSACAALDKKQKNFDKILSEWKQKYEETQAELEASQKESRSLSTELFKMKNAYEESLDHLETLKRENKNLQQEISDLTEQIAEGGKAIHELEKVKKQIEQEKSELQASLEEAEASLEHEEGKILRLQLELNQVKSEIDRKIAEKDEEIDQLKRNHLRIVESMQRTLDAEVRSRNEALRLKKKMEGDLNEMEIQLNHANRMAAEAQKNLRNTQGVLKDTQIHLDDALRSQEDLKEQVAMVERRANLLQAETEELRAALEQTERSRKVAEQELLDASERVQLLHTQNTSLINTKKKLESDISQIQSEMEDTIQEARNAEEKAKKAITDAAMMAEELKKEQDTSAHLERMKKNLDQTVKDLQHRLDEAEQLALKGGKKQIQKLEARVRELEGEVDAEQKRSAEAVKGVRKYERRVKELTYQSEEDRKNVLRLQDLVDKLQMKVKSYKRQAEEAEELSNVNLSKFRKIQHELEEAEERADIAESQVNKLRVKSREFHKKIEEEEI

SEQ ID NO: 7 - protein, 1937 aa, Salmo salar
MSTDAEMQVYGKAAIYLRKSEKERMEAQAMPFDSKNSCYVTDKVELYLKGLVTARADGKCTVTVTKPDGTKEEGKEFKDADIYEMNPPKYDKIEDMAMMTYLNEASVLYNLKERYAAWMIYTYSGLFCATVNPYKWLPVYDEEVVNAYRGKKRVEAPPHIFSVSDNAFQFMMIDKENQSVLITGESGAGKTVNTKRVIQYFATIAVSGGKKEADPNKMQGSLEDQIIAANPLLESYGNAKTVRNDNSSRFGKFIRIHFQAGKLAKADIETYLLEKSRVSFQLPDERGYHIFFQMMTGHKPELVELALLTTNPYDFPMCSQGQIAVASINDNEELDATDEAITILGFTNEEKLGIYKLTGAVVHHGNLKFKQKQREEQAEPDGTEVADKIAYLLGLNSAEMLKALCYPRVKVGNEYVTKGQTVAQVNNSVSALAKSIYERMFLWMVIRINEMLDTKNPRQFYIGVLDIAGFEIFDYNSMEQLCINFTNEKLQQFFNHTMFVLEQEEYKKEGIVWAFIDFGMDLAACIELIEKPLGIFSILEEECMFPKSSDTTFKDKLYAQHLGKTKAFEKPKPAKGKAEAHFSLVHYAGTVDYNITGWLEKNKDPLNDSVCQLYGKSGVKILAALYPPPPPEDKAKKGGKKKGGSMQTVSSQFRENLHKLMTNLRSTHPHFVRCLIPNESKTPGLMENFLVIHQLRCNGVLEGIRICRKGFPSRIIYADFKQRYKVLNASVIPEGQFMDNKKASEKLLGSIDVNHEDYKFGHTKVFFKAGLLGVLEEMRDEKLATLVGMVQALSRGFLMRREFSKMMERRESIYAIQYNIRSFMNVKTWPWMKLYFKIKPLLQSAETEKELANMKENYEKMKTDLAKALSTKKQMEEKLVSLTQEKNDLALQVASEGESLNDAEERCEGLIKSKIQQEAKLKETTERLEDEEEINAELTAKKRKLEDECSELKKDIDDLELTLAKVEKEKHATENKVKNLTEEMASMDESVAKLTKEKKALQEAHQQTLDDLQAEEDKVNTLTKAKTKLEQQVDDLEGSLEQEKKLRMDLERAKRKLEGDLKLAQESIMDLENDKQQADEKIKKKEFETTQLLSKIEDEQSLGAQLQKKIKELQARIEELEEEIEAERAARAKVEKQRADLSRELEEISERLEEAGGATAAQIEMNKKREAEFQKLRRDLEESTLQHEATAAALRKKQADSVAELGEQIDNLQRVKQKLEKEKSEYKMEIDDLSSNMEAVAKAKGNLEKMCRTLEDQLSELKTKNDENVRQVNDISGQRARLLTENGEFGRQLEEKEALVSQLTRGKQAFTQQVEELKRLIEEEVKAKNALAHGVQSARHDCDLLREQFEEEQEAKAELQRGMSKANSEVAQWRTKYETDAIQRTEELEEAKKKLAQRLQEAEETIEATNSKCASLEKTKQRLQGEVEDLMIDVERANALAANLDKKQRNFDKVLAEWKQKYEEGQAELEGAQKEARSMSTELFKMKNSYEEALDHLETLKRENKNLQQEISDLTEQIGETGKSIHELEKAKKTVETEKSEIQTALEEAEGTLEHEESKILRVQLELNQIKGEVDRKIAEKDEEMEQIKRNSQRVVDSMQSTLDSEVRSRNDALRVKKKMEGDLNEMEIQLSHSNRQAAEAQKQLRNVQGQLKDAQLHLDDAVRAAEDMKEQAAMVERRNGLMVAEIEELRVALEQTERGRKVAETELVDASERVGLLHSQNTSLLNTKKKLETDLVQVQGEVDDIVQEARNAEEKAKKAITDAAMMAEELKKEQDTSSHLERMKKNLEVTVKDLQHRLDEAENLAMKGGKKQLQKLESRVRELETEVEAEQRRGVDAVKGVRKYERRVKELTYQTEEDKKNVNRLQDLVDKLQMKVKAYKRQAEEAEEAANQHMSKFRKVQHELEEAEERADIAETQVNKLRAKTRDSGKGKEAAE

SEQ ID NO: 8 - protein, 832 aa, Salmo salar
MSTDAEMQIYGKAAIYLRKSEKERMEAQAAPFDSKNSCYVADKVELYLKGLITARADGKCTVTVTKPDGTKEEGKEFKDADIYEMNPPKYDKIEDMAMMTYLNEASVLYNLKERYAAWMIYTYSGLFCATVNPYKWLPVYDAEVVNAYRGKKRMEAPPHIFSVSDNAFQFMLIDKENQSVLITGESGAGKTVNTKRVIQYFATIAVSGGEKKKEVDPSKMQGSLEDQIIAANPLLEAYGNAKTVRNDNSSRFGKFIRIHFQGGKLAKADIETYLLEKSRVSFQLPDERGYHIFFQMMTGHKPEIVEMALITTNPYDFPMCSQGQIAVASIDDKEELDATDDAITILGFTNDEKIGIYKLTGAVVHHGNLKFKQKQREEQAEPDGTEVADKIGYLLGLNSAEMLKALCYPRVKVGNEYVTKGQTVPQVNNSVMALAKSIYERMFLWMVIRINEMLDTKNPRQFYIGVLDIAGFEIFDYNSMEQLCINFTNEKLQQFFNHTMFVLEQEEYKKEGIVWAFIDFGMDLAACIELIEKPLGIFSILEEECMFPKSSDTTFKDKLYSQHLGKTQAFEKPKPAKGKAEAHFSLVHYAGTVDYNITGWLEKNKDPLNDSVCQLYGKSGVKILAALYPAAPPEDTTKKGGKKKGGSMQTVSSQFRENLHKLMTNLRSTHPHFVRCLIPNESKTPGLMENFLVIHQLRCNGVLEGIRICRKGFPSRIIYADFKQRYKVLNASVIPEGQFMDNKKASEKLLGSIDVNHEDYKFGHTKVSQILYFKIKPLLQSAETEKELANMKENYEKMTADLAKALSTKKQMEEKLVALMQEKNDLALQVAS

SEQ ID NO: 9 - protein, 192 aa, Bos taurus
MAPKKDVKKPAAAAAPAPAPAPAPAPAPAPPKEEKIDLSAIKIEFSKQQQDEFKEAFLLFDRTGECKITLSQVGDVLRALGTNPTNAEVKKVLGNPSNEEMNAKKIEFEQFLPMLQAISNNKDQGTYEDFVEGLRVFDKEGNGTVMGAELRHVLATLGEKMKEEEVEALMAGQEDSNGCINYEAFVKHIMSN

SEQ ID NO: 10 - protein, 192 aa, Gallus gallus
MAPKKDVKKPAAAAAPAPAPAPAPAPAPAKPKEPAIDLKSIKIEFSKEQQDDFKEAFLLFDRTGDAKITLSQVGDIVRALGQNPTNAEINKILGNPSKEEMNAKKITFEEFLPMLQAAANNKDQGTFEDFVEGLRVFDKEGNGTVMGAELRHVLATLGEKMTEEEVEELMKGQEDSNGCINYEAFVKHIMSV

SEQ ID NO: 11 - protein, 150 aa, Gallus gallus
MSFSPDEINDFKEAFLLFDRTGDAKITLSQVGDIVRALGQNPTNAEINKILGNPSKEEMNAKKITFEEFLPMLQAAANNKDQGTFEDFVEGLRVFDKEGNGTVMGAELRHVLATLGEKMTEEEVEELMKGQEDSNGCINYEAFVKHIMSV

SEQ ID NO: 12 - protein, 161 aa, Salmo salar
MADAAPAEASGASAFTADQIEDFKEAFGLFDRVGDSMIGYNQVADVMRALGQNPQNKEVAAILGKPSADDMANKRLAFADFMPMMEKVDKIVKGTLDDYVEGLRVFDKEGNGTVSGAELRIVLGTLGEKMSEAEIDSLLIGQEDENGSINYEAFVKHVLSV

SEQ ID NO: 13 - protein, 1939 aa, Gallus gallus
MASPDAEMAAFGEAAPYLRKSEKERIEAQNKPFDAKSSVFVVHPKESFVKGTIQSKEGGKVTVKTEGGETLTVKEDQVFSMNPPKYDKIEDMAMMTHLHEPAVLYNLKERYAAWMIYTYSGLFCVTVNPYKWLPVYNPEVVLAYRGKKRQEAPPHIFSISDNAYQFMLTDRENQSILITGESGAGKTVNTKRVIQYFATIAASGEKKKEEQSGKMQGTLEDQIISANPLLEAFGNAKTVRNDNSSRFGKFIRIHFGATGKLASADIETYLLEKSRVTFQLPAERSYHIFYQIMSNKKPELIDMLLITTNPYDYHYVSQGEITVPSIDDQEELMATDSAIDILGFSADEKTAIYKLTGAVMHYGNLKFKQKQREEQAEPDGTEVADKAAYLMGLNSAELLKALCYPRVKVGNEFVTKGQTVSQVHNSVGALAKAVYEKMFLWMVIRINQQLDTKQPRQYFIGVLDIAGFEIFDFNSFEQLCINFTNEKLQQFFNHHMFVLEQEEYKKEGIEWEFIDFGMDLAACIELIEKPMGIFSILEEECMFPKATDTSFKNKLYDQHLGKSNNFQKPKPAKGKAEAHFSLVHYAGTVDYNISGWLEKNKDPLNETVIGLYQKSSVKTLALLFATYGGEAEGGGGKKGGKKKGSSFQTVSALFRENLNKLMANLRSTHPHFVRCIIPNETKTPGAMEHELVLHQLRCNGVLEGIRICRKGFPSRVLYADFKQRYRVLNASAIPEGQFMDSKKASEKLLGSIDVDHTQYRFGHTKVFFKAGLLGLLEEMRDDKLAEIITRTQARCRGFLMRVEYRRMVERRESIFCIQYNVRSFMNVKHWPWMKLFFKIKPLLKSAESEKEMANMKEEFEKTKEELAKSEAKRKELEEKMVVLLQEKNDLQLQVQAEADSLADAEERCDQLIKTKIQLEAKIKEVTERAEDEEEINAELTAKKRKLEDECSELKKDIDDLELTLAKVEKEKHATENKVKNLTEEMAVLDETIAKLTKEKKALQEAHQQTLDDLQVEEDKVNTLTKAKTKLEQQVDDLEGSLEQEKKLRMDLERAKRKLEGDLKLAHDSIMDLENDKQQLDEKLKKKDFEISQIQSKIEDEQALGMQLQKKIKELQARIEELEEEIEAERTSRAKAEKHRADLSRELEEISERLEEAGGATAAQIEMNKKREAEFQKMRRDLEEATLQHEATAAALRKKHADSTAELGEQIDNLQRVKQKLEKEKSELKMEIDDLASNMESVSKAKANLEKMCRTLEDQLSEIKTKEEQNQRMINDLNTQRARLQTETGEYSRQAEEKDALISQLSRGKQGFTQQIEELKRHLEEEIKAKNALAHALQSARHDCELLREQYEEEQEAKGELQRALSKANSEVAQWRTKYETDAIQRTEELEEAKKKLAQRLQDAEEHVEAVNAKCASLEKTKQRLQNEVEDLMVDVERSNAACAALDKKQKNFDKILAEWKQKYEETQTELEASQKESRSLSTELFKMKNAYEESLDHLETLKRENKNLQQEIADLTEQIAEGGKAVHELEKVKKHVEQEKSELQASLEEAEASLEHEEGKILRLQLELNQIKSEIDRKIAEKDEEIDQLKRNHLRIVESMQSTLDAEIRSRNEALRLKKKMEGDLNEMEIQLSHANRMAAEAQKNLRNTQGTLKDTQIHLDDALRTQEDLKEQVAMVERRANLLQAEVEELRGALEQTERSRKVAEQELLDATERVQLLHTQNTSLINTKKKLETDIVQIQSEMEDTIQEARNAEEKAKKAITDAAMMAEELKKEQDTSAHLERMKKNMDQTVKDLHVRLDEAEQLALKGGKKQLQKLEARVRELEGEVDSEQKRSAEAVKGVRKYERRVKELTYQCEEDRKNILRLQDLVDKLQMKVKSYKRQAEEAEELSNVNLSKFRKIQHELEEAEERADIAESQVNKLRVKSREIHGKKIEEEE

SEQ ID NO: 14 - protein, 947 aa, Gallus gallus
MRDLLVVPLGHVLTLAALSLAETLQKAPFISTPLETVDALVEDVPKFVCVVESYPEPEITWTRNSIPIRLFDTRYSIQRNGQLLTILSVEDSDDGVYCCTADNGVGAAAQSCGALQVKMRPKITRPPVNVEIIEGLKAVLPCTTMGNPKPSVSWIKGETVVKENARIAVLDSGNLRIHNVQREDAGQYRCVAKNSLGSAYSKPATVVVEVFARILKAPESQNITFGSMVTLRCTAAGAPVPTVTWLENGKAVSAGSIAESVKDRVVDSRLQVYVTRPGLFTCLATNKHSKTFGAAKAAATISVSEWSKLYKGDAGYCSTYRGEVCSAILSRNALVFFNSSYADPEETQELLVHTAWTELKTVSSFCQPAAESLLCNYIFQECKPSGVGPAPKPICRENCLAVKDLYCFKEWLSMEENSQRGIYKPGLMLLALPECNRLPSLHQDPSACTHIPFFDFKKENITRTCYSGNGQFYQGWANVTASGIPCQKWSDQAPHLHRRTPQVFPELSDAENYCRNPGGENERPWCYTKDPSVTWEYCSVSPCGDASLSLGTRKPNGETQNLPPPPSYSPTYSMNVIILIISSFALIVILGIITLVCCRRRKQWKNKKRESETPTLTTLPSELLLDRLHPNPMYQRMPLLLNPKLLSLEYPRNNIEYVRDIGEGAFGRVFQARAPGLLPYEPFTMVAVKMLKEEASADMQADFQREAALMAEFDNPNIVKLLGVCAVGKPMCLLFEYMAYGDLNEYLRDRSPRNLCSLVQGGLEARACLLNPLALCCTSQLCIAKQVAAGMAYLSERKFVHRDLATRNCLVGENMVVKIADFGLSRNMYSADYYKANENDAIPIRWMPPESIFYNRYTTESDVWAYGVVLWEIFSYGMQPYYGMAHEEVIYYVRDGNILSCPDNCPLELYNLMRLCWSKLPADRPSFASIHRILERMYERAVASPQV

SEQ ID NO: 15 - protein, 163 aa, Gallus gallus
MASMTDQQAEARAFLSEEMIAEFKAAFDMFDADGGGDISTKELGTVMRMLGQNPTKEELDAIIEEVDEDGSGTIDFEEFLVMMVRQMKEDAKGKSEEELANCFRIFDKNADGFIDIEELGEILRATGEHVTEEDIEDLMKDSDKNNDGRIDFDEFLKMMEGVQ

SEQ ID NO: 16 - protein, 159 aa, Sus scrofa
TDQQAEARSYLSEEMIAEFKAAFDMFDADGGGDISVKELGTVMRMLGQTPTKEELDAIIEEVDEDGSGTIDFEEFLVMMVRQMKEDAKGKSEEELAECFRIFDRNMDGYIDAEELAEIFRASGEHVTDEEIESIMKDGDKNNDGRIDFDEFLKMMEGVQ

SEQ ID NO: 17 - protein, 183 aa, Gallus gallus
MSDEEKKRRAATARRQHLKSAMLQLAVTEIEKEAAAKEVEKQNYLAEHCPPLSLPGSMQELQELCKKLHAKIDSVDEERYDTEVKLQKTNKELEDLSQKLFDLRGKFKRPPLRRVRMSADAMLRALLGSKHKVNMDLRANLKQVKKEDTEKEKDLRDVGDWRKNIEEKSGMEGRKKMFEAGES

SEQ ID NO: 18 - protein, 271 aa, Bos taurus
MSDEEVEHVEEEYEEEEEAQEEAPPPPAEVPEVHEEVHEVHEPEEVQEEEKPRPRLTAPKIPEGEKVDFDDIQKKRQNKDLMELQALIDSHFEARKKEEEELVALKERIEKRRAERAEQQRIRAEKERERQNRLAEEKARREEEDAKRRAEDDLKKKKALSSMGANYSSYLAKADQKRGKKQTAREMKKKVLAERRKPLNIDHLSEDKLRDKAKELWDTLYQLETDKFEYGEKLKRQKYDITNLRSRIDQAQKHSKKAGTAPKGKVGGRWK

SEQ ID NO: 19 - protein, 262 aa, Sus scrofa
MSDAEEQEYEEEQPEEEEAAEEEEAPEEPEPVAEREEERPKPSRPVVPPLIPPKIPEGERVDFDDIHRKRMEKDLLELQTLIDVHFEQRKKEEEELVALKERIERRRAERAEQQRFRTEKERERQAKLAEEKMRKEEEEAKKRAEDDAKKKKVLSNMGAHFGGYLVKAEQKRGKRQTGREMKQRILSERKKPLNIDHMGEDQLREKAQELSDWIHQLESEKFDLMAKLKQQKYEINVLYNRISHAQKFRKGAGKGRVGGRWK

SEQ ID NO: 20 - protein, 347 aa, Gallus gallus
MTSYRQELEKYRDIDEDKILQELSAEELEQLDTELLEMDPENVLLPAGLRQRDQTQKSPTGPLDREALLQHLEKQALEAKEREDLVPFTGEKKGKPFVPKNPTREIPREEQITLEPELEEALANATEAEMCDIAAILGMYTLMSNKQYYDAICSGTITNTEGINSVVKPDKYKPVPDEPPNPTNVEETLRQIQANDSALEDVNLNNIKDIPISTLKAICEAMKTNTHVKKLSLVATRSNDPVATAVAEMLAENKTLQSLNIESNFITSAGMMSVIKAMYQNSTLSELKVDNQCQRLGNTVEMEMATMLEQCPSVVRFGYHFTQQGPRARAAIAITRNNELRRKQKKT

SEQ ID NO: 21 - protein, 377 aa, Gallus gallus; identical to SEQ ID NO: 2

SEQ ID NO: 22 - protein, 897 aa, Gallus gallus
MNSMNQIETNMQYTYNYEEDEYMTQEEEWDRDLLLDPAWEKQQRKTFTAWCNSHLRKAGTQIENIEEDFRNGLKLMLLLEVISGERLPKPDRGKMRFHKIANVNKALDYIASKGVKLVSIGAEEIVDGNVKMTLGMIWTIILRFAIQDISVEETSAKEGLLLWCQRKTAPYRNVNIQNFHLSWKDGLGLCALIHRHRPDLIDYSKLNKDDPIGNINLAMEIAEKHLDIPKMLDAEDIVNTPKPDERAIMTYVSCFYHAFAGAEQAETAANRICKVLAVNQENERLMEEYERLASELLEWIRRTIPWLENRTPEKTMQAMQKKLEDFRDYRRKHKPPKVQEKCQLEINFNTLQTKLRISNRPAFMPSEGKMVSDIAGAWQRLEQAEKGYEEWLLNEIRRLERLEHLAEKFRQKASTHEQWAYGKEQILLQKDYESASLTEVRAMLRKHEAFESDLAAHQDRVEQIAAIAQELNELDYHDAASVNDRCQKICDQWDSLGTLTQKRREALERTEKLLETIDQLHLEFAKRAAPFNNWMEGAMEDLQDMFIVHSIEEIQSLISAHDQFKATLPEADGERQAILSIQNEVEKVIQSYSMRISASNPYSTVTVEEIRTKWEKVKQLVPQRDQSLQEELARQHANERLRRQFAAQANVIGPWIQTKMEEIARSSIEMTGPLEDQMNQLKQYEQNIINYKHNIDKLEGDHQLIQEALVFDNKHTNYTMEHIRVGWELLLTTIARTINEVETQILTRDAKGITQEQMNDFRASFNHFDRRKNGLMDHDDFRACLISMGYDLGEAEFARIMSLVDPNGQGTVTFQSFIDFMTRETADTDTAEQVIASFRILASDKPYILADELRRELPPEQAQYCIKRMPQYTGPGSVPGALDYTSFSSALYGESDL

SEQ ID NO: 23 - protein, 923 aa, Gallus gallus
MNSMNQIETNMQYTYNYEEDEYMTQEEEWDRDLLLDPAWEKQQRKTFTAWCNSHLRKAGTQIENIEEDFRNGLKLMLLLEVISGERLPKPDRGKMRFHKIANVNKALDYIASKGVKLVSIGAEEIVDGNVKMTLGMIWTIILRFAIQDISVEETSAKEGLLLWCQRKTAPYRNVNIQNFHLSWKDGLGLCALIHRHRPDLIDYSKLNKDDPIGNINLAMEIAEKHLDIPKMLDAEDIVNTPKPDERAIMTYVSCFYHAFAGAEQAETAANRICKVLAVNQENERLMEEYERLASELLEWIRRTIPWLENRTPEKTMQAMQKKLEDFRDYRRKHKPPKVQEKCQLEINFNTLQTKLRISNRPAFMPSEGKMVSDIAGAWQRLEQAEKGYEEWLLNEIRRLERLEHLAEKFRQKASTHEQWAYGKEQILLQKDYESASLTEVRAMLRKHEAFESDLAAHQDRVEQIAAIAQELNELDYHDAASVNDRCQKICDQWDSLGTLTQKRREALERTEKLLETIDQLHLEFAKRAAPFNNWMEGAMEDLQDMFIVHSIEEIQSLISAHDQFKATLPEADGERQAILSIQNEVEKVIQSYSMRISASNPYSTVTVEEIRTKWEKVKQLVPQRDQSLQEELARQHANERLRRQFAAQANVIGPWIQTKMEEIARSSIEMTGPLEDQMNQLKQYEQNIINYKHNIDKLEGDHQLIQEALVFDNKHTNYTMEHIRVGWELLLTTIARTINEVETQILTRDAKGITQEQMNDFRASFNHFDRRKNGLMDHDDFRACLISMGYDLDESDNLHSDEFKACLISLGEVGNDLQGEAEFARIMSLVDPNGQGTVTFQSFIDFMTRETADTDTAEQVIASFRILASDKPYILADELRRELPPEQAQYCIKRMPQYTGPGSVPGALDYTSFSSALYGESDL

SEQ ID NO: 24 - protein, 286 aa, Gallus gallus
MADFEDRVSDEEKVRIAAKFITHAPPGEFNEVFNDVRLLLNNDNLLREGAAHAFAQYNMDQFTPVKIEGYDDQVLITEHGDLGNGRFLDPRNKISFKFDHLRKEASDPQPEDTESALKQWRDACDSALRAYVKDHYPNGFCTVYGKSIDGQQTIIACIESHQFQPKNFWNGRWRSEWKFTITPPTAQVAAVLKIQVHYYEDGNVQLVSHKDIQDSVQVSSDVQTAKEFIKIIENAENEYQTAISENYQTMSDTTFKALRRQLPVTRTKIDWNKILSYKIGKEMQNA

SEQ ID NO: 25 - protein, 286 aa, Gallus gallus
MADLEEQLSDEEKVRIAAKFIIHAPPGEFNEVFNDVRLLLNNDNLLREGAAHAFAQYNLDQFTPVKIDGYDEQVLITEHGDLGNGKFLDPKNKISFKFDHLRKEATDPRPHEVENAIESWRNSVETAMKAYVKEHYPNGVCTVYGKTIDGQQTIIACIESHQFQAKNFWNGRWRSEWKFTISPSTTQVAGILKIQVHYYEDGNVQLVSHKDIQDSLTVSNEAQTAKEFIKIVEAAENEYQTAISENYQTMSDTTFKALRRQLPVTRTKIDWNKILSYKIGKEMQNA

SEQ ID NO: 26 - protein, 286 aa, Gallus gallus; identical to SEQ ID NO: 25

SEQ ID NO: 27 - protein, 290 aa, Gallus gallus
MSVGQGLCESEKVSLICGLMRQSPPGEFRQVVQDLCDLLQDDELVKQQAARAGARHNKNNFTPVLVNGNTVLLTQYNDLGGNRFFYPQDKFSFEFDHLSGVTSKTHLHRVMLDEGELWRGALHKGLNAYVNYHFPVGNCCVFKKSLGKRQMLVACIEAHQYQPSKHWNSLWKSDWTFSLTPVMTRVTGIFLLQLHYFRNANLHVTISKSVSESLHVIDRNQFVTDFVKFVKTEDNKIHNAILENIQALSEHTWRKNLRRRLPITRTFMNWNELLNNQHLKTGVSRKEVPP

SEQ ID NO: 28 - protein, 1940 aa, Gallus gallus
MATDADMAIFGEAAPYLRKSEKERIEAQNKPFDAKSSVFVVHAKESYVKSTIQSKESGKVTVKTEGGETLTVKEDQIFSMNPPKYDKIEDMAMMTHLHEPAVLYNLKERYAAWMIYTYSGLFCVTVNPYKWLPVYNPEVVLAYRGKKRQEAPPHIFSISDNAYQFMLTDRENQSILITGESGAGKTVNTKRVIQYFATIAASGDKKKEEQPAGKMQGTLEDQIISANPLLEAFGNAKTVRNDNSSRFGKFIRIHFGATGKLASADIETYLLEKSRVTFQLKAERSYHIFYQIMSNKKPELIEMLLITTNPYDYQYVSQGEITVPSINDQEELMATDSAIDILGFTPDEKTAIYKLTGAVMHYGNLKFKQKQREEQAEPGGTEVADKAAYLMGLNSADLLKALCYPRVKVGNEYVTKGQTVQQVYNSVGALAKSVFEKMFLWMVVRINQQLDTKQPRQYFIGVLDIAGFEIFDFNSLEQLCINFTNEKLQQFFNHHMFVLEQEEYKKEGIEWEFIDFGMDLAACIELIEKPMGIFSILEEECMFPKATDTSFKNKLYDQHLGKSNNFQKPKPGKGKAEAHFSLVHYAGTVDYNITGWLEKNKDPLNETVVGLYQKSSLKTLALLFASVGGAEAESGAGGKKGGKKKGSSFQTVSALFRENLNKLMSNLRSTHPHFVRCLIPNETKTPGAMEHELVLHQLRCNGVLEGIRICRKGFPIRILYADFKQRYKVLNASAIPEGQFIDSKKASEKLLGSIDVDHTQYKFGHTKVFFKAGLLGLLEEMRDEKLAQLITRTQARCRGFLMRVEFKKMMERRESIFCIQYNVRAFMNVKHWPWMKLFFKIKPLLKSAESEKEMANMKEEFEKTKEELAKSEAKRKELEEKMVSLLQEKNDLQLQVQAEADGLADAEERCDQLIKTKIQLEAKIKELTERAEDEEEMNAELTAKKRKLEDECSELKKDIDDLELTLAKVEKEKHATENKVKNLTEEMAALDETIAKLTKEKKALQEAHQQTLDDLQAEEDKVNTLTKAKTKLEQQVDDLEGSLEQEKKLRMDLERAKRKLEGDLKMTQESTMDLENDKQQLDEKLKKKDFEISQIQSKIEDEQALGMQLQKKIKELQARIEELEEEIEAERTSRAKAEKHRADLSRELEEISERLEEAGGATAAQIDMNKKREAEFQKMRRDLEEATLQHEATAAALRKKHADSTADVGEQIDNLQRVKQKLEKEKSELKMEIDDLASNMESVSKAKANLEKMCRSLEDQLSEIKTKEEEQQRTINDISAQKARLQTESGEYSRQVEEKDALISQLSRGKQAFTQQIEELKRHLEEEIKAKKCPAHALQSARHDCDLLREQYEEEQEAKGELQRALSKANSEVAQWRTKYETDAIQRTEELEEAKKKLAQRLQDAEEHVEAVNSKCASLEKTKQRLQNEVEDLMIDVERSNAACAALDKKQKNFDKILSEWKQKYEETQAELEASQKESRSLSTELFKMKNAYEESLDHLETLKRENKNLQQEISDLTEQIAEGGKAIHELEKVKKQIEQEKSELQTALEEAEASLEHEEGKILRVQLELNQVKSDIDRKIAEKDEEIDQLKRNHLRVVDSMQSTLDAEIRSRNEALRLKKKMEGDLNEIEIQLSHANRQAAEAQKNLRNTQGVLKDTQIHLDDALRSQEDLKEQVAMVERRANLLQAEIEELRAALEQTERSRKVAEQELLDASERVQLLHTQNTSLINTKKKLESDISQIQSEMEDTIQEARNAEEKAKKAITDAAMMAEELKKEQDTSAHLERMKKNLDQTVKDLQHRLDEAEQLALKGGKKQIQKLEARVRELEGEVDAEQKRSAEAVKGVRKYERRVKELTYQSEEDRKNVLRLQDLVDKLQMKVKSYKRQAEEAEELSNVNLSKFRKIQHELEEAEERADIAESQVNKLRAKSREIGKKAESEE

SEQ ID NO: 29 - protein, 1939 aa, Sus scrofa
MSSDQEMAIFGEAAPYLRKSEKERIEAQNRPFDAKTSVFVAEPKESFVKGTIQSREGGKVTVKTEAGATLTVKEDQVFPMNPPKFDKIEDMAMMTHLHEPGVLYNLKERYAAWMIYTYSGLFCVTVNPYKWLPVYNPEVVTAYRGKKRQEAPPHIFSISDNAYQFMLTDRENQSILITGESGAGKTVNTKRVIQYFATIAVTGEKKKEEPTSGKMQGTLEDQIISANPLLEAFGNAKTVRNDNSSRFGKFIRIHFGTTGKLASADIETYLLEKSRVTFQLKAERSYHIFYQITSNRKPELIEMLLITTNPYDYPFISQGEISVASIDDQEELIATDSAIDILGFTNEEKVSIYKLTGAVMHYGNLKFKQKQREEQAEPDGTEVADKAAYLQSLNSADLLKALCYPRVKVGNEYVTKGQTVEQVTNAVGALAKAVYEKMFLWMVTRINQQLDTKQPRQYFIGVLDIAGFEIFDFNSLEQLCINFTNEKLQQFFNHHMFVLEQEEYKREGIEWTFIDFGMDLAACIELIEKPMGIFSILEEECMFPKATDTSFKNKLYEQHLGKSANFQKPKPAKGKVEAHFSLIHYAGTVDYNITGWLDKNKDPLNDTVVGLYQKSALKTLAFLFSGAQTGEAEAGGTKKGGKKKGSSFQTVSALFRENLNKLMTNLRSTHPHFVRCIIPNETKTPGAMEHELVLHQLRCNGVLEGIRICRKGFPSRILYADFKQRYKVLNASAIPEGQYIDSKKASEKLLASIDIDHTQYKFGHTKVFFKAGLLGLLEEMRDDKLAQLITRTQARCRGFLARVEYQKMVERRESIFCIQYNIRAFMNVKHWPWMKLFFKIKPLLKSAESEKEMATMKEEFQKTKDELAKSEAKRKELEEKMVTLLKEKNDLQLQVQAEAEGLADAEERCDQLIKTKIQLEAKIKEVTERAEDEEEINAELTAKKRKLEDECSELKKDIDDLELTLAKVEKEKHATENKVKNLTEEMAGLDETIAKLTKEKKALQEAHQQTLDDLQAEEDKVNTLTKAKTKLEQQVDDLEGSLEQEKKLRMDLERAKRKLEGDLKLAQESIMDIENEKQQLDEKLKKKEFEISNLQSKIEDEQALAIQLQKKIKELQARIEELEEEIEAERASRAKAEKQRSDLSRELEEISERLEEAGGATSAQIEMNKKREAEFQKMRRDLEEATLQHEATAAALRKKHADSVAELGEQIDNLQRVKQKLEKEKSEMKMEIDDLASNMETVSKAKGNLEKMCRTLEDQLSELKSKEEEQQRLINDLTAQRGRLQTESGEFSRQLDEKEALVSQLSRGKQAYTQQIEELKRQLEEEIKAKNALAHALQSSRHDCDLLREQYEEEQESKAELQRALSKANTEVAQWRTKYETDAIQRTEELEEAKKKLAQRLQAAEEHVEAVNAKCASLEKTKQRLQNEVEDLMLDVERTNAACAALDKKQRNFDKILAEWKQKYEETHAELEASQKEARSLGTELFKMKNAYEESLDQLETLKRENKNLQQEISDLTEQIAEGGKRIHELEKIKKQVEQEKSEIQAALEEAEASLEHEEGKILRIQLELNQVKSEVDRKIAEKDEEIDQLKRNHVRVVESMQSMLDAEIRSRNDAIRLKKKMEGDLNEMEIQLNHANRMAAEALRNYRNTQGILKDTQIHLDDALRGQEDLKEQLAMVERRANLLQAEIEELRATLEQTERSRKVAEQELLDASERVQLLHTQNTSLINTKKKLETDISQMQGEMEDILQEARNAEEKAKKAITDAAMMAEELKKEQDTSAHLERMKKNMEQTVKDLQHRLDEAEQLALKGGKKQIQKLEARVRELEGEVESEQKRNAEAVKGLRKHERRVKELTYQTEEDRKNILRLQDLVDKLQAKVKSYKRQAEEAEEQSNTNLSKFRKLQHELEEAEERADIAESQVNKLRVKSREVHTKVISEE

SEQ ID NO: 30 - protein, 1937 aa, Sus scrofa
MSSDQEMAIFGEAAPYLRKSEKERIEAQNKPFDAKTSVFVAEPKESFVKGTVQSREGGKVTVKTEAGATLTVKEDQVFPMNPPKFDKIEDMAMMTHLHEPAVLYNLKERYAAWMIYTYSGLFCVTVNPYKWLPVYNAEVVTAYRGKKRQEAPPHIFSISDNAYQFMLTDRENQSILITGESGAGKTVNTKRVIQYFATIAVTGEKKKEEPTPGKMQGTLEDQIISANPLLEAFGNAKTVRNDNSSRFGKFIRIHFGTTGKLASADIETYLLEKSRVTFQLKAERSYHIFYQIMSNKKPELIEMLLITTNPYDYAFVSQGEITVPSIDDQEELMATDSAIEILGFTSDERVSIYKLTGAVMHYGNLKFKQKQREEQAEPDGTEVADKAAYLQGLNSADLLKALCYPRVKVGNEFVTKGQTVQQVYNAVGALAKAVYDKMFLWMVTRINQQLDTKQPRQYFIGVLDIAGFEIFDFNSLEQLCINFTNEKLQQFFNHHMFVLEQEEYKKEGIEWEFIDFGMDLAACIELIEKPMGIFSILEEECMFPKATDTSFKNKLYEQHLGKSNNFQKPKPAKGKAEAHFSLIHYAGTVDYNITGWLDKNKDPLNETVVGLYQKSSVKTLAFLFAERQSSEEGGTKKGGKKKGSSFQTVSALFRENLNKLMTNLRSTHPHFVRCIIPNETKTPGAMEHELVLHQLRCNGVLEGIRICRKGFPSRILYADFKQRYKVLNASAIPEGQFIDSKKASEKLLGSIDIDHTQYKFGHTKVFFKAGLLGTLEEMRDEKLAQLITRTQAMCRGFLMRVEFRKMMERRESIFCIQYNIRAFMNVKHWPWMKLYFKIKPLLKSAETEKEMANMKEEFEKTKEDLAKSEAKRKELEEKMVALMQEKNDLQLQVQAEADGLADAEERCDQLIKTKIQLEAKIKEVTERAEDEEEINAELTAKKRKLEDECSELKKDIDDLELTLAKVEKEKHATENKVKNLTEEMAGLDENIAKLTKEKKALQEAHQQTLDDLQAEEDKVNTLTKAKTKLEQQVDDLEGSLEQEKKLRMDLERAKRKLEGDLKLAQESTMDIENDKQQLDEKLKKKEFEMSNLQSKIEDEQALAMQLQKKIKELQARTEELEEEIEAERASRAKAEKQRSDLSRELEEISERLEEAGGATSAQIEMNKKREAEFQKMRRDLEEATLQHEATAAALRKKHADSVAELGEQIDNLQRVKQKLEKEKSELKMEIDDLASNMETVSKAKGNLEKMCRTLEDQLSEVKTKEEEHQRLINELSAQKARLQTESGEFSRQLDEKEALVSQLSRGKQAFTQQIEELKRQLEEETKAKSALAHAVQSSRHDCDLLREQYEEEQEAKAELQRAMSKANSEVAQWRTKYETDAIQRTEELEEAKKKLAQRLQDAEEHVEAVNAKCASLEKTKQRLQNEVEDLMLDVERSNAACAALDKKQRNFDKILAEWKHKYEETQAELEASQKESRSLSTELFKVKNAYEESLDQLETLKRENKNLQQEISDLTEQIAEGGKHIHELEKVKKQIEQEKSELQAALEEAEASLEHEEGKILRIQLELNQVKSEIDRKIAEKDEEIDQMKRNHIRVVESMQSTLDAEIRSRNDALRIKKKMEGDLNEMEIQLNHANRQATEAIRNLRNTQGVLKDTQLHLDDAIRGQDDLKEQLAMVERRANLMQAEIEELRASLEQTERSRRVAEQELLDASERVQLLHTQNTSLINTKKKLETDISQIQGEMEDIVQEARNAEEKAKKAITDAAMMAEELKKEQDTSAHLERMKKNMEQTVKDLQHRLDEAEQLALKGGKKQIQKLEARVRELENEVENEQKRNVEAVKGLRKHERRVKELTYQTEEDRKNVLRLQDLVDKLQSKVKAYKRQAEEAEEQSNVNLSKFRKLQHELEEAEERADIAESQVNKLRVKSREVHTKVISEE

SEQ ID NO: 31 - protein, 1941 aa, Gallus gallus
MATDADMAIFGEAAPYLRKSEKERIEAQNKPFDAKSSVFVVHAKESYVKSTIQSKESGHKVTVKTEGGETLTVKEDQIFSMNPPKYDKIEDMAMMTHLHEPAVLYNLKERYAAWMIYTYSGLFCVTVNPYKWLPVYNPEVVLAYRGKKRQEAPPHIFSISDNAYQFMLTDRENQSILITGESGAGKTVNTKRVIQYFATIAASGDKKKEEQPAGKMQGTLEDQIISANPLLEAFGNAKTVRNDNSSRFGKFIRIHFGATGKLASADIETYLLEKSRVTFQLKAERSYHIFYQIMSNKKPELIEMLLITTNPYDYQYVSQGEITVPSINDQEELMATDSAIDILGFTPDEKTAIYKLTGAVMHYGNLKFKQKQREEQAEPGGTEVADKAAYLMGLNSADLLKALCYPRVKVGNEYVTKGQTVQQVYNSVGALAKSVFEKMFLWMVVRINQQLDTKQPRQYFIGVLDIAGFEIFDFNSLEQLCINFTNEKLQQFFNHHMFVLEQEEYKKEGIEWEFIDFGMDLAACIELIEKPMGIFSILEEECMFPKATDTSFKNKLYDQHLGKSNNFQKPKPGKGKAEAHFSLVHYAGTVDYNITGWLEKNKDPLNETVVGLYQKSSLKTLALLFASVGGAEAESGAGGKKGGKKKGSSFQTVSALFRENLNKLMSNLRSTHPHFVRCLIPNETKTPGAMEHELVLHQLRCNGVLEGIRICRKGFPIRILYADFKQRYKVLNASAIPEGQFIDSKKASEKLLGSIDVDHTQYKFGHTKVFFKAGLLGLLEEMRDEKLAQLITRTQARCRGFLMRVEFKKMMERRESIFCIQYNVRAFMNVKHWPWMKLFFKIKPLLKSAESEKEMANMKEEFEKTKEELAKSEAKRKELEEKMVSLLQEKNDLQLQVQAEADGLADAEERCDQLIKTKIQLEAKIKELTERAEDEEEMNAELTAKKRKLEDECSELKKDIDDLELTLAKVEKEKHATENKVKNLTEEMAALDETIAKLTKEKKALQEAHQQTLDDLQAEEDKVNTLTKAKTKLEQQVDDLEGSLEQEKKLRMDLERAKRKLEGDLKMTQESTMDLENDKQQLDEKLKKKDFEISQIQSKIEDEQALGMQLQKKIKELQARIEELEEEIEAERTSRAKAEKHRADLSRELEEISERLEEAGGATAAQIDMNKKREAEFQKMRRDLEEATLQHEATAAALRKKHADSTADVGEQIDNLQRVKQKLEKEKSELKMEIDDLASNMESVSKAKANLEKMCRSLEDQLSEIKTKEEEQQRTINDISAQKARLQTESGEYSRQVEEKDALISQLSRGKQAFTQQIEELKRHLEEEIKAKKCPAHALQSARHDCDLLREQYEEEQEAKGELQRALSKANSEVAQWRTKYETDAIQRTEELEEAKKKLAQRLQDAEEHVEAVNSKCASLEKTKQRLQNEVEDLMIDVERSNAACAALDKKQKNFDKILSEWKQKYEETQAELEASQKESRSLSTELFKMKNAYEESLDHLETLKRENKNLQQEISDLTEQIAEGGKAIHELEKVKKQIEQEKSELQTALEEAEASLEHEEGKILRVQLELNQVKSDIDRKIAEKDEEIDQLKRNHLRVVDSMQSTLDAEIRSRNEALRLKKKMEGDLNEIEIQLSHANRQAAEAQKNLRNTQGVLKDTQIHLDDALRSQEDLKEQVAMVERRANLLQAEIEELRAALEQTERSRKVAEQELLDASERVQLLHTQNTSLINTKKKLESDISQIQSEMEDTIQEARNAEEKAKKAITDAAMMAEELKKEQDTSAHLERMKKNLDQTVKDLQHRLDEAEQLALKGGKKQIQKLEARVRELEGEVDAEQKRSAEAVKGVRKYERRVKELTYQSEEDRKNVLRLQDLVDKLQMKVKSYKRQAEEAEELSNVNLSKFRKIQHELEEAEERADIAESQVNKLRAKSREIGKKAESEE

SEQ ID NO: 32 - protein, 1939 aa, Sus scrofa
MSSDQEMAIFGEAAPYLRKSEKERIEAQNKPFDAKTSVFVAEPKESFVKGTVQSREGGKVTVKTEAGATLTVKEDQVFPMNPPKFDKIEDMAMMTHLHEPAVLYNLKERYAAWMIYTYSGLFCVTVNPYKWLPVYNAEVVTAYRGKKRQEAPPHIFSISDNAYQFMLTDRENQSILITGESGAGKTVNTKRVIQYFATIAVTGEKKKEEPTSGKMQGTLEDQIISANPLLEAFGNAKTVRNDNSSRFGKFIRIHFGTTGKLASADIETYLLEKSRVTFQLKAERSYHIFYQIMSNKKPELIEMLLITTNPYDYAFVSQGEITVPSIDDQEELMATDSAIEILGFTSDERVSIYKLTGAVMHYGNLKFKQKQREEQAEPDGTEVADKAAYLQGLNSADLLKALCYPRVKVGNEFVTKGQTVQQVYNAVGALAKAVYDKMFLWMVTRINQQLDTKQPRQYFIGVLDIAGFEIFDFNSLEQLCINFTNEKLQQFFNHHMFVLEQEEYKKEGIEWEFIDFGMDLAACIELIEKPMGIFSILEEECMFPKATDTSFKNKLYEQHLGKSNNFQKPKPAKGKVEAHFSLIHYAGTVDYNITGWLDKNKDPLNETVVGLYQKSSVKTLAFLFTGAAGADAEAGGGKKGGKKKGSSFQTVSALFRENLNKLMTNLRSTHPHFVRCIIPNETKTPGAMEHELVLHQLRCNGVLEGIRICRKGFPSRILYADFKQRYKVLNASAIPEGQFIDSKKASEKLLGSIDIDHTQYKFGHTKVFFKAGLLGLLEEMRDEKLAQLITRTQARCRGFLARVEYQKMVERRESIFCIQYNIRAFMNVKHWPWMKLYFKIKPLLKSAETEKEMANMKEEFEKTKESLAKAEAKRKELEEKMVALMQEKNDLQLQVQAEADSLADAEERCDQLIKTKIQLEAKIKEVTERAEDEEEINAELTAKKRKLEDECSELKKDIDDLELTLAKVEKEKHATENKVKNLTEEMAGLDETIAKLTKEKKALQEAHQQTLDDLQAEEDKVNTLTKAKTKLEQQVDDLEGSLEQEKKLRMDLERAKRKLEGDLKLAQESTMDIENDKQQLDEKLKKKEFEMSNLQSKIEDEQALAMQLQKKIKELQARIEELEEEIEAERASRAKAEKQRSDLSRELEEISERLEEAGGATSAQIEMNKKREAEFQKMRRDLEEATLQHEATAATLRKKHADSVAELGEQIDNLQRVKQKLEKEKSEMKMEIDDLASNMETVSKAKGNLEKMCRTLEDQLSELKTKEEEQQRLINDLTAQRARLQTESGEYSRQLDEKDTLVSQLSRGKQAFTQQIEELKRQLEEEIKAKSALAHAVQSSRHDCDLLREQYEEEQEAKAELQRAMSKANSEVAQWRTKYETDAIQRTEELEEAKKKLAQRLQDAEEHVEAVNAKCASLEKTKQRLQNEVEDLMIDVERSNAACAALDKKQRNFDKILAEWKQKYEETHAELEASQKESRSLSTELFKVKNAYEESLDQLETLKRENKNLQQEISDLTEQIAEGGKRIHELEKIKKQVEQEKSEIQAALEEAEASLEHEEGKILRIQLELNQVKSEVDRKIAEKDEEIDQLKRNHVRVVESMQSMLDAEIRSRNDAIRLKKKMEGDLNEMEIQLNHANRMAAEALRNYRNTQGILKDTQIHLDDALRSQEDLKEQLAMVERRANLLQAEIEELRATLEQTERSRKVAEQELLDASERVQLLHTQNTSLINTKKKLETDISQIQGEMEDIIQEARNAEEKAKKAITDAAMMAEELKKEQDTSAHLERMKKNLEQTVKDLQHRLDEAEQLALKGGKKQIQKLEARVRELEGEVESEQKRNVETVKGLRKHERRVKELTYQTEEDRKNILRLQDLVDKLQAKVKSYKRQAEEAEEQSNVNLSKFRKLQHELEEAEERADIAESQVNKLRVKSREVHTKIISEE

SEQ ID NO: 33 - protein, 1941 aa, Gallus gallus
MASSDAEMAAFGEAAPYHRKSEKERIEAQNKPFDAKSSVFVAHPKESFVKGTIQSRETGKVTVKTEGGETLTVKEDQVFSMNPPKYDKIEDMAMMTHLHEPAVLYNLKERYAAWMIYTYSGLFCVTVNPYKWLPVYNPEVVLAYRGKKRQEAPPHIFSISDNAYQFMLTDRENQSILITGESGAGKTVNTKRVIQYFATIAASGEKKKEEQSGKMQGTLEDQIISANPLLEAFGNAETVRNDNSSRFGKFIRIHFGATGKLASADIETYLLEKSRVTFQLKAERSYHIFYQIMSNKKPELIDMLLITTNPYDYHFVSQGEITVPSIDDQEELMATDSAIDILGFTADEKTAISKLTGAVMHYGNLKFKQKQREEQAEPDGTEVADKAAYLMGLNSADLLKALCYPRVKVGNEYVTKGQTVQQVHNAVGALAKAVYEKMFLWMVVRINQQLDTKQPRQYFIGVLDIAGFEIFDFNSFEQLCINFTNEKLQQFFNHHMFVLEQEEYKKEGIEWTFIDFGMDLAACIELIEKPMGIFSILEEECMFPKATDTSFKNKLYDQHLGKSSNFQKPKPAKGKAEAHFSLVHYAGTVDYNITGWLEKNKDPLNETVIGLYQKSSVKTLALLFATYGGADAEAGGGGKKGGKKKGSSFQTVSALFRENLNKLMTNLRSTHPHFVRCIIPNETKTPGAMEHELVLHQLRCNGVLEGIRICRKGFPSRVLYADFKQRYKVLNASAIPEGQFIDSKKASEKLLSSIDVDHTQYKFGHTKVFFKAGLLGLLEEMRDEKLAQLITRTQARSRGFLMRVEYQRMVERRESIFCIQYNVRSFMNVKHWPWMKLFFKIKPLLKSAESEKEMANMKEEFEKTKEELAKSEAKRKELEEKMVKLVQEKNDLQLQVQAEADSLADAEERCDQLIKTKIQLEAKIKEVTERAEDEEEINAELTAKKRKLEDECSELKKDMDDLELTLAKVEKEKHATENKVKNLTEEMAALDETIVKLTKEKKALQEAHQQTLDDLQAEEDKVNTLTKAKTKLEQQVDDLEGSLEQEKKLRMDLERAKRKLEGDLKLAHDSIMDLENDKQQLDEKLKKKDFEISQIQSKIEDEQALGMQLQKKIKELQARIEELEEEIEAERTSRAKAEKHRADLSRELEEISERLEEAGGATAAQIDMNKKREAEFQKMRRDLEEATLQHEATAAALRKKHADSTAELGEQIDNLQRVKQKLEKEKSELKMEIDDLASNMESVSKAKANLEKMCRTLEDQLSEIKTKEEEHQRMINDLNTQRARLQTEAGEYSRQVEEKDALISQLSRGKQAFTQQIEELKRHLEEEIKAKNALAHALQSARHDCDLLREQYEEEQEAKGELQRALSKANSEVAQWRTKYETDAIQRTEELEEAKKKLAQRLQDAEEHVEAVNAKCASLEKTKQRLQNEVEDLMIDVERANAACAALDKKQKNFDKILAEWKQKYEETQAELEASQKESRSLSTELFKMKNAYEESLDHLQTLKRENKNLQQEISDLTEQIAEGGKAIHELEKVKKQIEQEKSEIQAALEEAEASLEHEEGKILRLQLELNQVKSEIDRKIAEKDEEIDQLKRNHLRIVESLQSSLDAEIRSRNEALRLKKKMEGDLNEMEIQLSHANRVAAEAQKNLRNTQAVLKDTQIHLDDALRTQEVLKEQVAMVERRANLLQAEIEELRAALEQTERSRKVAEQELMDASERVQLLHTQNTSLINTKKKLETDIAQIQSEMEDTIQEARNTEEKAKKAITDAAMMAEELKKEQDTSAHLERMKKNLDQTVKDLQHRLDEAEQLALKGGKKQIQKLEARVRELEGEVDAEQKRSAEAVKGVRKYERRVKELTYQSEEDLKNILRLQDLVDKLQMKVKSYKRQAEEAEELSNVNLSKFRKIQHELEEAEERADIAESQVNKLRVKSREFHSKKIEEEE

SEQ ID NO: 34 - protein, 1939 aa, Gallus gallus; identical to SEQ ID NO: 13

SEQ ID NO: 35 - protein, 1132 aa, Gallus gallus
MPEPSKAAPKKEAKKKEEKKEEKKEAPPPQEHKDEAPDDVHPPETPDPEGLFLSKPQNVMVESGRDVTVSARVAGAALPCAPAVKWFKGKWAELGDKSARCRLRHSVDDDKVHTFELTITKVAMGDRGDYRCEVTAKEQKDSCSFSIDVEAPRSSEGNVLQAFKRTGEGKDDTAGELDFSGLLKKREVQVEEKKKKKDEDDQFPPEIWELLKGVTKKSEYERIAFQYGITDLRGMLKRLKKVHVEPKKSEAFIRKLDPAYQVDKGNKIKLVVELSDPDLPLKWYKNGQLLKPSTKYVFENVGLKRILTIHKCSLADDAAYECRVNDEKCFTEVFVKEPPVTVVRGLEDQQVVVGDRVVLEAEVSEEGAQVMWLKDGVDVTRDDAFKYRFKKDGKKHFLIINEAELSDSAHYKIMTNGGESEAELSVEEKQLEVLQDMADLTVKASEQAVFKCEVSDEKVTGRWFRNGVEVKPSKRIHISHNGRFHKLVIDDVRPEDEGDYTFIPDGYALSLSAKLNFLEIKVEYVPKQEPPKIHLDCSGKAAENTIVVVAGNKVRLDVPISGEPAPTVTWKRGDQLFTATEGRVHIDSQADLSSFVIESAERSDEGRYCITVTNPVGEDSATLHVRVVDVPDPPQSVRVTSVGEDWAVLSWEAPPFDGGMPITGYLMERKKKGSMRWMKLNFEVFPDTTYESTKMIEGVFYEMRVFAVNAIGVSQPSLNTQPFMPIAPTSEPTHVVLEDVTDTTATIKWRPPERIGAGGVDGYLVEWCREGSNEWVAANTELVERCGLTARGLPTGERLLFRVISVNMAGKSPPATMAQPVTIREIVERPKIRLPRHLRQTYIRRVGEQVNLVIPFQGKPRPQVTWSREGGALPAEVQTRTSDVDSVFFIRSAARPLSGNYEMRVRIDNMEDCATLRLRVVERPGPPQAVRVMEVWGSNALLQWEPPKDDGNAEISGYTVQKADTRTMEWFTVLEHSRPTRCTVSELVMGNEYRFRVYSENVCGTSQEPATSHNTARIAKEGLTLKMVPYKERDLRAAPQFLTPLVDRSVVAGYTVTLNCAVRGHPKPKVTWLKNSVEIGADPKFLSRHGLGVLSLLIRRPGPFDGGTYGCRAVNEMGEATTECRLDVRVPQ

SEQ ID NO: 36 - protein, 1135 aa, Bos taurus
MPEAKPAAKKAPAGKDAAAKPAPKEATPQEAPAAPPTEAPPEDQSPTAEEPTGVFLKKPDSVSVETGKDTVIVAKLNGKELPAKPAVKWFKGKWLELGSKSGARFSFKESHDAASNVYTIELHITKVVLGDRGDYRIEVKAKDFCDSCAFNIDVEAPRQDSAGQSLESFKRSGEAKSDTAGELDFSGLLKKRQVVEEEKKKKKDDDDLGIPPEIWELLKGAKKSEYERIAFQYGITDLRGMLKRLKKAKVEVKKSAAFTKKLDPAYQVDRGNKIKLVVEISDPDLPLKWFKNGQEIKPSSKYVFENVGKKRILTINKCTLADDAAYEVVVKDEKCFTELFVKVEPPVLIVTPLEDQQVFVGDRVEMAVEVSEEGAQVMWLKDGVELTREDSFKARYRLKKDGKRHILIYSEVTMEDKGHYQVMTNGGQCEAELIVEEKQLEVLQDIADLTVKASEQAVFKCEVSDEKVTGKWYKNGVEVRPSKRITISHTGRFHKLVIDDVRPEDEGDYTFVPDGYALSLSAKLKFLEIKVEYVPKQEPPKIHLDCSGQTSENAIVVVAGNKLRMDVSITGEPRPVATWMKEDEVFTGTEGRVRIEQRGDISSFVIESAERGDEGRYTIKVTNPVGEDVASILLKVVDVPDPPEAVRVTSVGEDWAVLVWEPPKYDGGRPVTGYLLERKKKGSQRWMKLNFEVFTETTYESTNMIEGILYEMRVFAAPLIQQLKTLTPQPHAPFSPTSEPQHLTVEDVTDTTTTLKWRPPDKIGAGGIDGYLIEYCVEGSDEWIPANTEPVERCGFTVKNLPTGAKITFRVVGVNIAGRSQPATLAQPVTIREIVEQPKIRLPRHLRQTYVRKVGEHLNLVIPFQVRRAKGGAPIDTSHVHVRTSDFDTVFFVRQAARSDSGEYELTVQIENMKDTATVCIRVVEKAGPPQNVMVKEVWGTNALVEWQPPKDDGNSEITGYFVQKADKKTMEWFTVYERNRHTSCTVSDLIMGNEYYFRVYSENVCGLSDLPGVSKNTARIVKTGMTLKLPEYKEHDFRTPPKFLTPLPDRVVVAGYAAALNCAVRGHPKPKVVWMKNKMEIREDPKFLMTNQQGVLTLNIRRPSPFDSGTYSCRAVNELGEALAECKLEVRAPR

SEQ ID NO: 37 - protein, 537 aa, Gallus gallus
MTGKTAPAAAKKAPAAKKAPAPASKKAPEPAPKEKPAPTPKEGHAPTPKEEHAPPPKEEHAPPPKEEHAPAPAAETPPAPEHPPDAEQPAAPAAEHAPTPTHEAAPAHEEGPPPAAPAEAPAPEPEPEKPKEEPPSVPLSLAVEEVTENSVTLTWKAPEHTGKSSLDGYVVEICKDGSTDWTAVNKEPFLSTRYKIHDLASGEKVHVRVKAISASGTSDPATLEQPVLIREITDLPRIRLPRQLRQVYVRHVGEAVNLLIPFQGKPQPQVTWTKDNQPLDTSRVNIRNTDKDTIFFIRTAQRSDSGKYQLSVRINGAEDKAILDIRVIERPGPPQNLKLVDVWGFNVALEWSPPADNGNSEIKGYTVQKSDKKSGKWFTVLERCTRTSCTISDLIIGNTYSFRVFSENACGMSETAAVAAGVAHIKKTVYQPQKIPERDMMEPPKFTQPLTDRATTRGYSTHLFCSVRGFPQPKIIWMKNKMEIREDPKYIAMIEQGVCSLEIRKPSPFDAGVYTCKAVNPLGEASVDCKLDVKMPK

SEQ ID NO: 38 - protein, 491 aa, Bos taurus
MTEKATSEAPACGLEETTSESAHVPLTEPSGDTAAPQAPGGEQAPRGQQASDPQESARQPPDPAASAAPAGPAATDPALPREDVPSAPLLLAVEDVSDSSVTVSWEPPERLGRLGLQGYVLELRREGALDWVPVNARPMMVTQQTLRNLAVGDKFFVRVAAVSSAGAGPPAVLERLIHIQETIEAPKIRVPRHLRQTYIRQVGESINLQIPFQGNPKPQALWTHNGHALDSQRVSVRTGDQDSILFIRSAQRSDSGCYELTVQLKDLEAKAAINILVIEKPGPPRSIRLLDVWNCNATLEWTPPQDTGNTELLGYTVQKADKKTGQWFTVLERCHPTSCTVSDLIVGNSYSFRVFSENLCGLSASAAVTKELAHIVKTDIVAKPKSFVERDFSEAPSFTQPLADHTSTPGYSTQLSCSVRASPKPKIIWMKNKMDIQGDPKYRALSEQGVCTLEIRKPSPFDSGVYTCKAINVLGEASVDCRLEVKASATH

SEQ ID NO: 39 - protein, 8074 aa, Gallus gallus
MTTKAPTFTQPLQSVVALEGSAATFEAHISGFPVPEVSWYRDGQVLSAATLPGVQISFSDGRAKLVIPSVTEANSGRYTIQATNGSGQATSTAELLVTAGTAPPNFSQRLQSMTARQGSQVRLDVRVTGIPTPVVKFYRDGVEIQSSPDFQILQEGDLYSLIIAEAYPEDSGTYSVNATNNVGRATSTAELLIQGEEEAVPAKKTKTIVSTAQISQTRQARIEKKIETHFDARSLTSVEMVIEGAAAQQLPHKAPPRMPPRPTSKSPTPPVITAKAQMARQQSPSPVRQSPSPVRHVRAPTPSPVRSVSPAGRISTSPIRPVKSPSPIRKAQVVTPGAEVLPPWRQEGYSATAEAQMKETRVSTSATEIRTEERWEGRYGLQEQVTISGAAAGEVAAGAKEVRKEPEKTPVPTVIIATDKAKEQERISTAREEISARHEQVHVSHEQIEAGKRAEAVATVVAAVDQARVRSPWETEQVDETYVKKKTLEYGYKEHAVKDHEAQAEHHVATKEVKTVYVPPEKHIPAAEKKEVHVSTEIKRETEAKIEKTIHIEHPRPRTASPHFTVSKIAVPKPDHTYEVSIAGSAMATLEKELSATSAAQKITKPVKPPQLKPHEVKIKPESAPPQFPFTEAAETYKAHYDVETKKEVDVSIKGEAVREDHLLLRKESEAKVTETARVPVPAEIPVTPPTLVWGLKNKTVTEGESVTLECHISGHPQPTVTWYREDYKIESSMDFQITFKAGLARLVIREAFAEDSGRFTCTATNKAGSVSTSCHLHVKVSEETETRETISEKVVTEEKSYVETKDVVMEDVSAAAEEVSGEPVPPFFIRKPVVHKLIEGGSIIFECQVGGNPKPHVLWKKGGVPLTTGYRYKVSYKRETGECKLEISMTFADDAGEYTIVIRNKFGEASATVSLLEEADYEAYIKSQQEMMYQTQVTAYVQEPKVAEVAPPISYGDFDKEYEKEQALIRKKMAKDTVMVRTFVEDEEFHISSFEERLIKEIELRIIKTTLDELLEEDGEEMMIDISESEAIGAGFDLRLKNYRTFEGTGVTFHCKTTGYPLPKIAWYKDGKRIRHGERYHMEVLQDGSASLRLPVVLPEDEGIYTVFASNMKGNAICSAKLYVEPVAPTATPGYMPGPEVMRRYRSISPRSPSRSPARSSPSCSPARRLDETDEGQLERLYKPVFVLKPTSVKCSQGQTARFDLKVVGRPMPETYWFHNGQQVVNDYTHKIVIKEDGTQSLIIVPAMPEDSGEWAVIAQNRAGKASVSVTLSVEAKEDLVRPRFVERLRNVSVKEGSRLHMAVKATGNPNPDIVWLKNSDIIVPHKYPRIRIEGTKGAAALNIESTARQDAAWYTATAINKAGRDTTRCKVNVEVEHAEPEPERRLIIPKGTYKAKEIAAPELEPLHLRYGQEQWEEGDLYDKEKQQKPFFKKKLTSLRLKQFGPAHFECRLTPIGDPTMVVEWLHDGKPLEAANRLRMINEFGYCSLDYGVAYSRDSGVITCRATNKYGTDHTSATLIVKDEKSLVEESQLPEGRRGMQRIEELERMAHEGALPAVAVDQKEKQKPELVLVPEPARVLEGETARFRCRVTGYPLPKVNWYLNSQLIRKSKRFRLRYDGIHYLDIVDCKSYDTGEVKVTAENPEGFIEHKVKLEIQQREDFRSVLRRAPEPRHEPVVTEPGKLLFEVQKIDKPAEATTKEVVKLKRAERITHEKLSEESEELRSKFKRRTEEGYYEAITAVELKSRKKDESYEEMLKKTKEELLHWTKEIPEEEKKALPPEGKITIPTFKPEKVELSPSMEAPKIFERIQSQTVAQGTDAHFRVRVVGKPDPECQWFRNGVQIERTDRIYWYWPEDNVCELVIRDVTADDSASIMVKAVNIAGETSSHAFLLVQAKQLISFIQNLQDVVAKERDSMATFECETSEPFIKVKWFKNGIEIHSGEKYRMHSDRKAHFLSVLAVEMSDADDYSCALVEDESVKTTAKLIVEGAVVEFIKELEDVEVPESFTGELECEVSPEDIEGKWYHGDVELSSNHKYVLASRRGRRILTIKDVNKDDQGEYSFVVDGKRTHCKLKMKPRPMTILQGLTDQKVCEGDIVQLEVKVSVENVEGVWMKDGHEIQSSDRIHIVLDKQSHMLLIEDATQEDSGTYSFSIPGLELSTTGQVTVYSVEIIVPLKDVHVVEGTKAILECKVSAPDVTSSKWYLNDHQIKPDERVQAVCKGTKQRLVITRTHASDEGHYKLMVGKVETSCNVTVEEIEIIRGLHDITCTETQNVSFEVELSHSGIDVIWHFKGQEIKAGPKYKIEARGKIYKLTVVKMMKDDEGEYVFYAGGKKTSGKLIVAGGAISKPLADLTVAESQRAVFECEVANPESEGQWLKNGKPLPMTDQYRAETDGVKRRLNIPAAKMDDMGEYSYEIASSKTSAKLHVEAVKIKKTLKNLTVTETQEAVFSVELSHPDVKGALWIKNGVELESNDKYEISVKGTVHTLKIKHCVVTDESVYSFKLGKIGANARLHVETVKIIKKPKDVTALENAVVSFELSVSHDTVPVRWFHKNVELKQSDKYKMISQRKVHKLMLHNISPADAGEYTAFVGQLECKAKLFVETIHITKTMKSIEIPETKTASFQCEVSHFNVPSVWLKNGVEIEMSEKFKIVVQGKLHQLNIMNTSSEDSAEYTFVCGNDRVSATLTVKPILITSMLEDINAEEKDTITFEVTVNYEGISYKWLKNGVEIKSTDKCQIRTKKLTHSLSIRNVHFGDAAEYSFVAGKAASSATLYVEARHIEFRKHIKDIKVVEKKRAIFECEISEPDVQVQWMKDGQELQIGDRMKIQREKYVHRLIIPSTKMSDAGQYTVVAGGNTSSANLIVEGRDVRIRSIRKEIQVIERQRAEIEFEVNEDDIEPQWYKDGIEINFHYEERYSYVVERRIHRMSIFETTYSDAGEYTFVAGRNRSSVVLYVNAPEPPQIIQELQPTTVESGKPARFCAIISGKPQPKVSWYKDDQQLSPGFKCKFLHDAQEYTLLLIETFPEDSAVYTCEAKNDYGVATTSASLSVEIPEVVSPELEVPVYPPAVIVPLRDAVTSEGQSARFQCRVTGTDLKVSWYSKDREIKPSRFFRMTQFEDTYQLEIAEAYPEDEGTYTFVASNSVGQVTSTAILKLEAPEKIMYEKLEEEIEMEVKVAPILRRRLEPLEVAVNHVAKFTCEVETTPNVKFQWYKAGREIYDGDKYSIRSSNYLSTLEIPRPQVVDCGEYSCKASNQHGSVSSTAFLTVTEPPRFIKKLDSSRLVKQHDSTRYECKVGGSPEIKVTWYKGETEIHPSEKYSMSFVDSVAVLEMHNLSVEDSGDYSCEAQNPAGSASTSTSLKVKAPPAFTKKPHPVQTLKGSDVHLECELQGTPPFQISWYKDKREIRSSKKYKVMSENYLASIHILNVDTADVGEYHCKAVNDVGSDSCIGSVTLRAPPTFVKKLSDVTVVVGETIELQAAVEGAQPISVLWLKDKGEIIRESENLWISYSENVASLKIGNAEPTNAGKYICQIKNDAGFQECFAKLTVLEPAVIVEKPGPVKVTAGDSCTLECTVDGTPELTARWFKDGNELSTDHKYKISFFNKVSGLKILNAGLEDSGEYTFEVKNSVGKSSCTASLQVSDRIMPPSFTRKLKETYGQLGSSAVLECKVYGSPPILVSWFHDGQEITSGDKYQATLTDNTCSLKVNGLQESDMGTYSCTATNVAGSDECSAFLSVREPPSFVKKPEPFNVLSGENITFTSIVKGSPPLEVKWFRGSIELAPGHKCNITLQDSVAELELFDVQPLQSGDYTCQVSNEAGKISCTTHLFVKEPAKFVMKVNDLSVEKGKNLILECTYTGTPPISVTWKKNGVILKHSEKCSITTTETSAILEIPNSKLEDQGQYSCHIENDSGQDNCHGAITILEPPYFVTPLEPVQVTVGDSASLQCQVAGTPEMIVSWYKGDTKLRGTATVKMHFKNQVATLVFSQVDSDDSGEYICKVENTVGEATSSSLLTVQERKLPPSFTRKLRDVHETVGLPVTFDCGIAGSEPIEVSWFKDNVRVKEDYNVHTSFIDNVAILQILKTDKSLMGQYTCTASNAIGTASSSGKLVLTEGKTPPFFDTPITPVDGIIGESADFECHISGTQPIRVTWAKDNQEIRTGGNYQISYVENTAHLTILRVDRGDSGKYTCYASNEVGKDSCTAQLNVKERKTPPTFTRKLSEAVEETEGNELKLEGRVAGSQPLTVSWYKNNQEVHSSPHCEISFKNNTLLLHIKSVGQSDAGLYTCKVSNEAGSVLCTSSVVIREPKKPPVFDQPLQPAATEEGDTLQLSCHVRGSEPIRIQWLKAGREIRASERCSFSFANGVALLELAAVTKSDSGEYVCKASNVAGTDTCRSKVTVKEKAALVSAAKKADIEGKLYFVSEPQSIKVMEKTVATFIAKVGGDPIPNVKWMKGKWRQLNQGGRIIIQQRGDEAKLEIKDTTKTDSGLYKCVAFNQHGEIERSVNLQVEERKQEVVEEDVRGKLKRIPTKKKEDEEQTIDILELLKNVDPKEYEKYARMYGITDFRGLLQAFELLKQTREEESHRLEIELTEKAQKEDQEFEELVAFIQQRLTQTEPVTLIRDIENQTVLTDEDAIFECEIKINYPEIKLSWYKGTQKLDSSDKYKIKIEGDRHILKIKNCQLEDQGNYRIVCGPHIASARLTVIEPAVERHLHDTTFKEGNTCTLSCQFSIPNAKSQWYRNGRPIKIGGRYSTQVSDKVHKLIIKDVRTEDQGQYTCKLDNLETTADLTIEAEPIQFTKSIQNIVVSEHQSATFECEVSFDDAVVTWYKGPTELTESPKYSFRSEGRCHYMTIHNVTAEDEGVYSVIARLEPRGEARSTAELYLVTKEIKLELKPPDVPDAKVAVPPQKPAEAAPIPILLPLIPTPEEKKPAEKKVPVKKVSKKVVKKGPKEIPPPEVPEILPEKPKEVKITSMARREEIHEEKMEIYEKPKKVYEEWEEDYGEDHDYYFKEEGYDEGEEEWEETYDKREVAYEEEQIIHEEVVEVPKKPVPERKPPAITAEKKEKKEVTVHKVPDVPKKIPEEKVPITVPKKPEPTPAKEPEVHKIIEEKIKVSEPKKPEVPPAKVPEVPKKVVKEEVSVEVPKKPEPPPAKVPEVPKKVVPEEKVHVEVPKKAEPPPPKVLRKKPEEEEPKPEKEPKPEVKPVPTPVEKIKKPEVPEVPKKKTEIPVIKKEEKHVPEPPKEPKPAAISVPGPEPKPAVALKSPKPAAEPAPAITTAPVTTPVVGKKAEAKPTKEETPKGISPVKAKKTPSPADAERRKLRPGSGGEKPPEEPPFTYQLKAVPLKFVKEMKDIVLKEAESVGSSAIFEVLISPSTAITSWMKDGSNIRESPKHKFIADGKDRKLHIIDVQLSDAGEYTCVLRLGNKEKTSTAKLIVEELPVRFVKTLEEEVTVVKGQPLYLTCELNKERSVVWRRDGKIIKDKPGKFALGIIGLSHSLTITDSDDSDAGTYTVTVEDSELSCSSCVKVVEVIRDWLVKPIRDQHVKPKGTATFTCDIVKDTPNIKWFKGDEEIPAEPTDKTEILKEGNKIFLKIKNAGPADIGEYSVEVEGRRYPAKLTLGEREVELLKPLEDVTVYEKETANFDTEISEEDIPGEWKLKGEILRPSPTCEIKAEGGKRFLTLHKVKLEQAGEVLYQALNAVTTAILTVKEIELDFAVPLKDVTVPEKRQARFECVLTREANVIWSKGTDILKIGEKFDIIADGKKHILVINDSQFDDEGEYTAEVEGKKSTARLFVEGVRLKFITPLQDQTVKEGETAYFQFELSHEGMLVKWYKNDKRLHTSRTVFITSEGKVHKLEMREVTLDDISEIKAVVKDMNTQANLKVLEADPYFTVKLQDYSALEKDDITLQCELSKDVPVKWYKDGEELVASSRISIKTDGLRRILTIKKATEGDKGVYECSCGTDKTNCNIGVEPRLIKVERPLYGVEVFVGETARFEIEISEPDVHPIWKLKGETLTPSPECEIIEDGKKHILILHQGRLDMTGEVSFQAANAKSAANLKVKELPLIFITPLSDVKVFEKDEAKFECEVSREPKTFRWLKGTQEITPDERFEIISDGTKHALIIKSVAFDDEAKYMFEAEDKRTSAKLIIEGIRLKFITPLKDVTKKERETAVFTVELSHENIPVVWFKNDQRLHTSKVVSMTDDGKFHTLTIKDLTIDDTSQIRVEAMGKSSEAKLTVLEGDPYFTGKLQDYTAVEKDEVILQCEISKADAPVKWMKDGKPITPSKNVVIKADGKKRILILKKALKKDIGQYTCDCGTDQTSANLNIEDRDIEIIRPLYSVEVIETETARFDIEISEEGVHGNWKLKGEPLTESPDCEIKEEGKKHFLTLYNVRLDQAGGVDFQAANAKSGAHLRVKPRVIGLLRPLKDVTVTAGESATFDCELSYEGIPVEWYLQGKKLEPSDKVVTRAEGRAHTLILRDVKLTDAGEVSLTAKDFRTQANLFVKEPPVEFTKPLEDQTVEEEATAILECEVSRENAKVKWFKNGEEIHKTKKYDIISEGRVRKLIIHGCTLDDAKTYTCDAKDFKTSCFLNVEPLRVEFLRPLTDLEVKEKRICSVLNVKFLAQGVKVKWFKDGIEIEKAEYDIISKGAERILVISKCLFDDEAEYACEAKTARTSGLLTVIEEEAVFTKNLHDLEVNENETVRLICEISKPNAEVTWFKGDEEVPDGGRFEYISDGRKRILVIRNAHPEDAGKYTCKLPSSSTTGKLTVHELAAEFLTRPQNLEVLEGDKAEFACSVSKEAITVQWLWGDTVLEPGDKYDIISDGKKRTLVVKDSVVGDAGKYTVMVGEAKATARLTVIEKTQDYNSLKDQEVNEGQEIIFNCEVNKEGAKEKWYKNGEAIFDSAKYIIVQKDLVYTLRIRDTQLKDQATYSISLSNHRGEHAESSAALTVLEEGLRIVEPLEDIETMEKKTVTFWCKVNRLNATLKWTKNGEEITFNKRILYKIDKYKHSLIIKDCGFKDEGEYTVTAGQDKSVAELLITEAPADFIEHLQDQTVTEFDDAVFTCQLSKEKASVKWYRNGREIKEGKKYQFEKDGNLHRLIIKDCRLDDECEYSCGVDDRKSRARLFVEEIPVEIIRPPQDVYEAPGADVIFMAELNKDGVEVKWLRNNMIIIQGDKHQMMSEGKVHRLQVCEIKPRDQGEYRFIAKDKEARAKLELAAAPRIKTGDQNLVVDVGNPLTMTVPYDAYPRAEAEWLKGEESLPTTTVDTTTDCTTFKIYEAKKSDKGRYKVVLRNKHAQAEAFINVEVIDVPGPVRNLEVTEIYDGEVGLAWQEPESDGGSKIIGYVVERRDIKRKTWIVVTDHAENCEYTVTGLQKGGVEYLFRVSARNRVGTGEPVETERPVEAKSKFEVPGPPQNVEVTDVNRFGRTLTWEAPEYDGGSPITGYVIELRNRASIKWEPTMTTGADELSAVLTDVVENEEYFFRVRAQNMVGVGKPSHPTRAVKITDPIERPSGNINLDHSDQTKTSVQLTWEPPLEDGGSPILGYIIERKEEGTDKWIRCNPKLVPACAFKVTGLKAGSSYYYRVSAENAAGVSDPAEAIGPLTADDPFVDLQWPLSAFKDGLEVIVPEPIKIRVPITGYPIPTATWSFGDQVLEEGGRVTMKTTSTFAELVITPSERPDKGIYTLTLENPVSSVSGEIDVNVLARPSAPKELKVVDVSRSTVQLSWEPPEDDGGSPVIDYIIEKREVSRKTWIKVMDHVIDQEFSVPDLIQGKEYLFRVCACNKCGPGEPAYIDEPINMSAPATVPDPPENVKWRNPTSKGIFLTWEPPKYDGGARIKGYLVEKCQRGTDKWEICGEPVIETKMEVTKLKEGEWYAYRVKALNRIGASKPSKPTDDIQAIDAKEAPEIFLDVKLLAGLTVKAGTKIELPAKITGKPEPQITWTKAEKLLRPDDRITIETTPNHSTVTITDSKRSDSGTYIIEAVNSSGRATAVVEVNVLDKPGPPAAFDVSEITNESCLLTWNPPRDDGGSKITNYVLEKRATDSEIWHKLSSTI

SEQ ID NO: 40 - protein, 539 aa, Gallus gallus
EGEEEWEETYDKREVAYEEEQIIHEEVVEVPKKPVPERKPPAITAEKKEKKEVTVHKVVKKPVDEKVEITTQRVAEEKLKQAEVTKKIPSAKPTPMIIEEKVMKKEAHKEVEEEEEREVISEELETHHVEVPDVPKKIPEEKVPITVPKKPEPTPAKEPEVHKIIEEKIKVSEPKKPEVPPAKVPEVPKKVVKEEVSVEVPKKPEPPPAKVPEVPKKVVPEEKVHVEVPKKAEPPPPKVLRKKPEEEEPKPEKEPKPEVKPVPTPVEKIKKPEVPEVPKKKTEIPVIKKEEKHVPEPPKEPKPAAISVPGPEPKPAVALKSPKPAAEPAPAITTAPVTTPVVGKKAEAKPTKEETPKGISPVKAKKTPSPADAERRKLRPGSGGEKPPEEPPFTYQLKAVPLKFVKEMKDIVLKEAESVGSSAIFEVLISPSTAITSWMKDGSNIRESPKHKFIADGKDRKLHIIDVQLSDAGEYTCVLRLGNKEKTSTAKLIVEELPVRFVKTLEEEVTVVKGQPLYLTCELNKERSVVWRRDGKIIK

SEQ ID NO: 41 - protein, 989 aa, Gallus gallus
SDKYKIKIEGDRHILKIKNCQLEDQGNYRIVCGPHIASARLTVIAEPIQFTKSIQNIVVSEHQSATFECEVSFDDAVVTWYKGPTELTESPKYSFRSEGRCHYMTIHNVTAEDEGVYSVIARLEPRGEARSTAELYLVTKEIKLELKPPDVPDAKVAVPPQKPAEAAPIPILLPLIPTPEEKKPAEKKVPVKKVSKKVVKKGPKEIPPPEVPEILPEKPKEVKITSMARREEIHEEKMEIYEKPKKVYEEWEEDYGEDHDYYFKEEGYDEGEEEWEETYDKREVAYEEEQIIHEEVVEVPKKPVPERKPPAITAEKKEKKEVTVHKVPDVPKKIPEEKVPITVPKKPEPTPAKEPEVHKIIEEKIKVSEPKKPEVPPAKVPEVPKKVVKEEVSVEVPKKPEPPPAKVPEVPKKVVPEEKVHVEVPKKAEPPPPKVLRKKPEEEEPKPEKEPKPEVKPVPTPVEKIKKPEVPEVPKKKTEIPVIKKEEKHVPEPPKEPKPAAISVPGPEPKPAVALKSPKPAAEPAPAITTAPVTTPVVGKKAEAKPTKEETPKGISPVKAKKTPSPADAERRKLRPGSGGEKPPEEPPFTYQLKAVPLKFVKEMKDIVLKEAESVGSSAIFEVLISPSTAITSWMKDGSNIRESPKHKFIADGKDRKLHIIDVQLSDAGEYTCVLRLGNKEKTSTAKLIVEELPVRFVKTLEEEVTVVKGQPLYLTCELNKERSVVWRRDGKIIKDKPGKFALGIIGLSHSLTITDSDDSDAGTYTVTVEDSELSCSSCVKVVEVIRDWLVKPIRDQHVKPKGTATFTCDIVKDTPNIKWFKGDEEIPAEPTDKTEILKEGNKIFLKIKNAGPADIGEYSVEVEGRRYPAKLTLGEREVELLKPLEDVTVYEKETANFDTEISEEDIPGEWKLKGEILRPSPTCEIKAEGGKRFLTLHKVKLEQAGEVLYQALNAVTTAILTVKEIELDFAVPLKDVTVPEKRQARFEC

SEQ ID NO: 42 - protein, 1020 aa, Gallus gallus
KSRLRRRREREITEITSEEEEEIEMVQHVHREFSPPSRLLRRRRSLSPTYIELMRPVSELIRPRSRPPEESERRSPTPERTRPRSPSPVSTERSLSRFERMARFDIFSRYESMKSALKTQKTMERKYEVLTQQPFTLDHAPRITLRMRSHRVPCGHNTRFILNVQSKPTADVKWYHNGIELQESSKIHFSNTSGVLTLEILDCHIDDSGTYRAVCTNYKGECSDYATLDVTGGDYTTYSSQRRDEEVPRSILPDLTRTEAYAVSSFKKATAAEASSSVREVKSEVSATRESLLSYEHHASSEEKITASEEKSLEERTVHKAFKSTLPATILTKPRSITVSEGETARFSCDVDGEPAPTITWVRAGQPIVSSRRFQITRTQYKSTFEISLVQIADEGSYTVVVENSEGRQEAHFTLTVQRKRIPEKAITSPPRIKSPEPRVKSPEPVKSPKRVKSPEPISTPSKAKSPPGDKTAPVEKVQLPTASPPKIKEQLKAETLGDKVKLSCAVESSVLSIREVAWYKDGKKLKEDHHFKFHYAADGTYELKIHNLTESDKGEYTCEIMGEGGISKTNFQFTGQVFKNIHSQVQSVSETPKSVEKGDKVLAVSTQKKSSAATEEKAAIEEVIKKSIVTEDVKQLQAEIRASSTQMTVSEGQKVTLKANIPGASEVKWVLNGMELRNSDDYRYGISGSNHTLTIKKASNKDEGILTCEGKTDEGTIKCQYVLTFSKEPSNEPAFITQPKSQNVNEGQDVLFTCEVSGDPSPEVEWLRNNQPIAVSSHMRATRSKNTYSLEIRNAAVSDTGKYTVKAKNYHGQCSATASLTVFPLIEEPPKEVVLKTSGDASMHESFSSQSFQMAASKQEASFSSFSSSSMTETKFASMSAKSMSSMKESFVEMSSSSIMGKSSMAQLESSTSKMLKSGVRGVPPKIEALPSDISIDEGKVLTLSCAFSGEPAPEITWYCRGRKITSQDQQGRFHIETSEDLTTLIIMDVQKNDGGIYTLNLGNEFGTDSATVNINIRS

SEQ ID NO: 43 - protein, 4162 aa, Gallus gallus
MTTKAPTFTQPLQSVVALEGSAATFEAHISGFPVPEVSWYRDGQVLSAATLPGVQISFSDGRAKLVIPSVTEANSGRYTIQATNGSGQATSTAELLVTAGTAPPNFSQRLQSMTARQGSQVRLDVRVTGIPTPVVKFYRDGVEIQSSPDFQILQEGDLYSLIIAEAYPEDSGTYSVNATNNVGRATSTAELLIQGEEEAVPAKKTKTIVSTAQISQTRQARIEKKIETHFDARSLTSVEMVIEGAAAQQLPHKAPPRMPPRPTSKSPTPPVITAKAQMARQQSPSPVRQSPSPVRHVRAPTPSPVRSVSPAGRISTSPIRPVKSPSPIRKAQVVTPGAEVLPPWRQEGYSATAEAQMKETRVSTSATEIRTEERWEGRYGLQEQVTISGAAAGEVAAGAKEVRKEPEKTPVPTVIIATDKAKEQERISTAREEISARHEQVHVSHEQIEAGKRAEAVATVVAAVDQARVRSPWETEQVDETYVKKKTLEYGYKEHAVKDHEAQAEHHVATKEVKTVYVPPEKHIPAAEKKEVHVSTEIKRETEAKIEKTIHIEHPRPRTASPHFTVSKIAVPKPDHTYEVSIAGSAMATLEKELSATSAAQKITKPVKPPQLKPHEVKIKPESAPPQFPFTEAAETYKAHYDVETKKEVDVSIKGEAVREDHLLLRKESEAKVTETARVPVPAEIPVTPPTLVWGLKNKTVTEGESVTLECHISGHPQPTVTWYREDYKIESSMDFQITFKAGLARLVIREAFAEDSGRFTCTATNKAGSVSTSCHLHVKVSEETETRETISEKVVTEEKSYVETKDVVMEDVSAAAEEVSGEPVPPFFIRKPVVHKLIEGGSIIFECQVGGNPKPHVLWKKGGVPLTTGYRYKVSYKRETGECKLEISMTFADDAGEYTIVIRNKFGEASATVSLLEEADYEAYIKSQQEMMYQTQVTAYVQEPKVAEVAPPISYGDFDKEYEKEQALIRKKMAKDTVMVRTFVEDEEFHISSFEERLIKEIELRIIKTTLDELLEEDGEEMMIDISESEAIGAGFDLRLKNYRTFEGTGVTFHCKTTGYPLPKIAWYKDGKRIRHGERYHMEVLQDGSASLRLPVVLPEDEGIYTVFASNMKGNAICSAKLYVEPVAPTATPGYMPGPEVMRRYRSISPRSPSRSPARSSPSCSPARRLDETDEGQLERLYKPVFVLKPTSVKCSQGQTARFDLKVVGRPMPETYWFHNGQQVVNDYTHKIVIKEDGTQSLIIVPAMPEDSGEWAVIAQNRAGKASVSVTLSVEAKEDLVRPRFVERLRNVSVKEGSRLHMAVKATGNPNPDIVWLKNSDIIVPHKYPRIRIEGTKGAAALNIESTARQDAAWYTATAINKAGRDTTRCKVNVEVEHAEPEPERRLIIPKGTYKAKEIAAPELEPLHLRYGQEQWEEGDLYDKEKQQKPFFKKKLTSLRLKQFGPAHFECRLTPIGDPTMVVEWLHDGKPLEAANRLRMINEFGYCSLDYGVAYSRDSGVITCRATNKYGTDHTSATLIVKDEKSLVEESQLPEGRRGMQRIEELERMAHEGALPAVAVDQKEKQKPELVLVPEPARVLEGETARFRCRVTGYPLPKVNWYLNSQLIRKSKRFRLRYDGIHYLDIVDCKSYDTGEVKVTAENPEGFIEHKVKLEIQQREDFRSVLRRAPEPRHEPVVTEPGKLLFEVQKIDKPAEATTKEVVKLKRAERITHEKLSEESEELRSKFKRRTEEGYYEAITAVELKSRKKDESYEEMLKKTKEELLHWTKEIPEEEKKALPPEGKITIPTFKPEKVELSPSMEAPKIFERIQSQTVAQGTDAHFRVRVVGKPDPECQWFRNGVQIERTDRIYWYWPEDNVCELVIRDVTADDSASIMVKAVNIAGETSSHAFLLVQAKQLISFIQNLQDVVAKERDSMATFECETSEPFIKVKWFKNGIEIHSGEKYRMHSDRKAHFLSVLAVEMSDADDYSCALVEDESVKTTAKLIVEGAVVEFIKELEDVEVPESFTGELECEVSPEDIEGKWYHGDVELSSNHKYVLASRRGRRILTIKDVNKDDQGEYSFVVDGKRTHCKLKMKPRPMTILQGLTDQKVCEGDIVQLEVKVSVENVEGVWMKDGHEIQSSDRIHIVLDKQSHMLLIEDATQEDSGTYSFSIPGLELSTTGQVTVYSVEIIVPLKDVHVVEGTKAILECKVSAPDVTSSKWYLNDHQIKPDERVQAVCKGTKQRLVITRTHASDEGHYKLMVGKVETSCNVTVEEIEIIRGLHDITCTETQNVSFEVELSHSGIDVIWHFKGQEIKAGPKYKIEARGKIYKLTVVKMMKDDEGEYVFYAGGKKTSGKLIVAGGAISKPLADLTVAESQRAVFECEVANPESEGQWLKNGKPLPMTDQYRAETDGVKRRLNIPAAKMDDMGEYSYEIASSKTSAKLHVEAVKIKKTLKNLTVTETQEAVFSVELSHPDVKGALWIKNGVELESNDKYEISVKGTVHTLKIKHCVVTDESVYSFKLGKIGANARLHVETVKIIKKPKDVTALENAVVSFELSVSHDTVPVRWFHKNVELKQSDKYKMISQRKVHKLMLHNISPADAGEYTAFVGQLECKAKLFVETIHITKTMKSIEIPETKTASFQCEVSHFNVPSVWLKNGVEIEMSEKFKIVVQGKLHQLNIMNTSSEDSAEYTFVCGNDRVSATLTVKPILITSMLEDINAEEKDTITFEVTVNYEGISYKWLKNGVEIKSTDKCQIRTKKLTHSLSIRNVHFGDAAEYSFVAGKAASSATLYVEARHIEFRKHIKDIKVVEKKRAIFECEISEPDVQVQWMKDGQELQIGDRMKIQREKYVHRLIIPSTKMSDAGQYTVVAGGNTSSANLIVEGRDVRIRSIRKEIQVIERQRAEIEFEVNEDDIEPQWYKDGIEINFHYEERYSYVVERRIHRMSIFETTYSDAGEYTFVAGRNRSSVVLYVNAPEPPQIIQELQPTTVESGKPARFCAIISGKPQPKVSWYKDDQQLSPGFKCKFLHDAQEYTLLLIETFPEDSAVYTCEAKNDYGVATTSASLSVEIPEVVSPELEVPVYPPAVIVPLRDAVTSEGQSARFQCRVTGTDLKVSWYSKDREIKPSRFFRMTQFEDTYQLEIAEAYPEDEGTYTFVASNSVGQVTSTAILKLEAPEKIMYEKLEEEIEMEVKVAPILRRRLEPLEVAVNHVAKFTCEVETTPNVKFQWYKAGREIYDGDKYSIRSSNYLSTLEIPRPQVVDCGEYSCKASNQHGSVSSTAFLTVTEPPRFIKKLDSSRLVKQHDSTRYECKVGGSPEIKVTWYKGETEIHPSEKYSMSFVDSVAVLEMHNLSVEDSGDYSCEAQNPAGSASTSTSLKVKAPPAFTKKPHPVQTLKGSDVHLECELQGTPPFQISWYKDKREIRSSKKYKVMSENYLASIHILNVDTADVGEYHCKAVNDVGSDSCIGSVTLRAPPTFVKKLSDVTVVVGETIELQAAVEGAQPISVLWLKDKGEIIRESENLWISYSENVASLKIGNAEPTNAGKYICQIKNDAGFQECFAKLTVLEPAVIVEKPGPVKVTAGDSCTLECTVDGTPELTARWFKDGNELSTDHKYKISFFNKVSGLKILNAGLEDSGEYTFEVKNSVGKSSCTASLQVSDRIMPPSFTRKLKETYGQLGSSAVLECKVYGSPPILVSWFHDGQEITSGDKYQATLTDNTCSLKVNGLQESDMGTYSCTATNVAGSDECSAFLSVREPPSFVKKPEPFNVLSGENITFTSIVKGSPPLEVKWFRGSIELAPGHKCNITLQDSVAELELFDVQPLQSGDYTCQVSNEAGKISCTTHLFVKEPAKFVMKVNDLSVEKGKNLILECTYTGTPPISVTWKKNGVILKHSEKCSITTTETSAILEIPNSKLEDQGQYSCHIENDSGQDNCHGAITILEPPYFVTPLEPVQVTVGDSASLQCQVAGTPEMIVSWYKGDTKLRGTATVKMHFKNQVATLVFSQVDSDDSGEYICKVENTVGEATSSSLLTVQERKLPPSFTRKLRDVHETVGLPVTFDCGIAGSEPIEVSWFKDNVRVKEDYNVHTSFIDNVAILQILKTDKSLMGQYTCTASNAIGTASSSGKLVLTEGKTPPFFDTPITPVDGIIGESADFECHISGTQPIRVTWAKDNQ

SEQ ID NO: 44 - protein, 817 aa, Gallus gallus
RESDHRAWTPVSYTVTRQNAVVQGLTEGKAYFFRIAAENIIGMGPFTETTKELIIRDPITVPDRPEDLEVKAVTKNSVTLTWNPPKYNGGSDITMYVLESRLIGKEKFHRVTKEKMLDRKYTVEGLKEGDTYEYRVSACNIVGQGKPSFCTKPITCKDEIAPPTLDLDFRDKLIVRVGEAFSLTGRYSGKPTPKITWLRDDIVLKEDDRTKIKTTPTTLCLGILKSVREDSGKYCVTVENSTGSRKGFCQVTVVDRPSPPVGPVIFDEVHKDHMIVSWKPPLDDGGSEITNYIIEKKDTHRDLWMPVTSATVKTTCKIPKLLEGREYQVRIYAENLYGISDPLISDEMKAKDRFSVPDAPEQPVIKDVTKDSAVVVWNKPYDGGKPITNYIVEKKETMATRWVRVTKDPIFPSTQFKVPDLLEGCQYEFRVSAENEIGVGNPSPPSKPIFARDPIVKPSPPVNPEAVDKTKNSVDLTWQPPRHDGNGKIIGYLVEYQKVGDEEWKKANLTPDSCPETKYKVTGLTEGLTYKFRVMAVNAAGESEPAYVPDPVEVKDRLEPPELILDANMAREQHVRAGDTLRLSAVIKGVPFPKVSWKKEDKEVSPKADIEVTGVGSKLEIRNTVHEDGGIYSLTVENPAGSKTVSVKVLVLDKPGPPRNLQVSDVRSDSCYLTWKEPEDDGGSVITNYVVERKDVASAQWVSVSSSSKKRSHMAKYLMEGTQYLFRVAAENLFGRGPYVETLKPIKAMDPLHPPGPPKNLHHIDVDKTEVSLVWNRPDRDGGAEITGYLVEYQEDGADEWTKFQTVPMLDCVVTGL

SEQ ID NO: 45 - protein, 595 aa, Gallus gallus
VTTKQTVISRTREGIVTSQEQRHISREKVRKEPEKTPVPTVIIVTAKVKEQERISTAREEISARHEQVHVSHEQIRREDVKPSVPKVVITTDKPKAPVLISQSKEGIATKKEHVSISHEKIKKEAKKTTAVLKIIAPVTVSRTREEITAKPEQMHLAYDQIEAGKRAEAVATVVAAVDQARVRSPWETEQVDETYVKKKTLEYGYKEHAVKAHEAQAEHHVATKEVKTVYVPPEKHIPAAEKKEVHVSTEIKRETEAKIEKTNHIEHPRPRTASPHFTVSKIAVPKPDHTYEVSIAGSAMATLEKELSATSAEQKITKPVKPPQLKPHEVKIKPESAPPPFPFTEAAETYKAHYDVETKKEVDVSIKGGAVREDHLLLRKESEAKVTETARVPVPAEIPVTPTHLVWGLKNKTVTEGESVTLECHISGHPQPTVTWYRDDYKIESSMDFQITFKAGLARLVIREAFAEASGRFTCTATNKAGSVSTSCHLHVKVSEETETRETISEKVVTEEKSYVETQDVVMEDASPPPEEVSGEPVPPFFIRKPVVHTLIVGGSIIFEFHVGGNPKPHVLLKKGGVPLTTGYRYKVSYKRETG

SEQ ID NO: 46 - protein, 34340 aa, Bos taurus
MATQAPTFTQPLQSVVVLEGSTATFEAHISGFPVPEVSWFRDGQVISTSTLPGVQISFSDGRAKLTIPAVTKANSGRYSLRATNGSGQATSTAELLVTAETAPPNFTQRLQSMTVRQGSQVRLQVRVTGIPTPVVKFYRDGAEIQSSLDFQISQEGELYSLLIAEAYPEDSGTYSVNATNSVGRATSTAELLVQGEEVVPAKRTKTIVSTAQISETRQTRIEKKIEAHFDARSIAAVEMVIDGAAGQQLPHKTPPRIPPKPKSRSPTPPSIAAKAQLARQQSPSPIRHSPSPVRHVRAPTPSPVRSVSPAGRISTSPIRSVKSPLLVRKAQTPTMPPGPEVPPPWKQEGYVASSEAEMRETTVTSATQIRTEERWEGRYGIQEQVTISGAAGAAASTTFAAGAVAAGAAEVKQEADKSAAVATVVAAVDMARVREPVISAVEQTAQRTTTTAVHIQPAHEQIRKEAEKTAVTKVVVAADKAKEQEVKARTREVITTKQEQVHVTHEQIRKETEKAFVPKVVISAAKAKEKETKITGEITTKQEQKQITQETIIQKAETAAVSMVVVETAKPTTLETILGAQEEIVTQQDQMHITHEKILKETRKTVVPKVIVATPKVKEQDVVSRTREGITTKREQVQVTHEKMRKEAEKTALSTIAVATAKAKEQETILRTREEMATRQEQIQVTHGKVGVGKKAEAVATVVAAVDQARVREPREPRHVEESYAQQTTLEYGYKEHISATKVAEQPPRPASEPQVVPKAVKPGVIHAPSETHIATTDQMGMHISSQIKKTTDLTSERLVHVDKRPRTASPHFTVSKISVPKTEHGYEASIAGSAIATLQKELSATPSAQKVTKSVKAPTVKPAEARVRAEPTPSPQFPFAETPETFKSQAGIEVKKEVGVSITGVAVREERFEALRERETKVTETARVPAPVEIPVTPPTLVSGLKNVTVIEGESVTLECHISGYPSPKVTWYREDYQIESSIDFQITFQSGIARLLIREAFAEDSGRFTCTAVNEAGTVSTSCYLAVQVSEEFEKETTAVAEKITTEEKRFVESRDVVMTDTSITEEHAGPGEPAAPFFITKPVVQKLVEGGSIVFECQVGGNPKPHVYWKKSGVPLTSGYRYKVSYNKQTGECRLVISMTFADDAGEYTIVIRNKHGETSASASLLEEADYESLMKSQQEMLYQTQVTAFVQEPKVGEIAPGYVYSEYEKEYEKEQALIRKKMAKDTVMVRTFVEDQEFHISSFEERLIKEIEYRIIKTTLEELLEEDGEEKMAVDISESEAIEAGFDLRVKNYRILEGMGVTFHCKMSGYPLPKIAWYKDGKRIKHGERYHMDFLQDGRASLRIPVVLPEDEGIYTAFASNMKGNAICSGKLYVEPAAPLSAPTYIPTPEPVSRIRSISPRSVSRSPIRMSPARMSPARMSPGRRLEETDESQLERLYKPVFVLKPTSFKCVEGQTARFDLKVVGRPMPETFWFHDGQQIVNDYTHKVVVKEDGTQSLLIVPATPSDSGEWTVVAQNRAGKSSISVILTVEAVEHQVKPVFVEKLRNLNIKEGSRLEMKVRATGNPNPDIVWLKNSEIIVPHKYPKIRIEGTKGEAALKIDSTVSQDSAWYTATAINKAGRDTTRCKVNVEVEFAEPEPERRLIIPRGTYRAKEIAAPELEPLHLRYGQEQWEEGDLYDKEKQQKPFFKKKLTSLRLKRFGPAHFECRLTPIGDPTMVVEWLHDGKPLEAANRLRMINEFGYCSLDYAVAYSRDSGVITCRATNKYGTDHTSATLIVKDEKSLVEESQLPEGRKGLQRIEELERMAHEGALTGVTTDQKEKQKPDIVLFPEPVRVLEGETARFRCRVTGYPQPKVNWYLNGQLIRKSKRFRVRYDGIHYLDIVDCKSYDTGEVKVTAENPEGVIDHKVKLEIQQREDFRSVLRRAPEPKPEFHVHEPGKLQFEVQKVDRPVDTTETKEIVRLKRAERITHEKVSEESEELRSKFKRRTEEGYYEAITAVELKSRKKDESYEELLRKTKEELLHWTKELTEEEKKALAEEGKITIPTFKPDKIELSPSMEAPKIFERIQSQTVGQGSDAHFRVRVVGKPDPECEWYKNGVKIERSDRIYWYWPEDNVCELVIRDVTAEDSASIMVKAINIAGETSSHAFLLVQAKQLITFTQELQDVVAKEKDTMATFECETSEPFVKVKWYKDGVEIHTGDKYRMHSDRKVHFLSVLMIDTSDAEDYSCVLVEDENVKTTAKLIVEGAVVEFVKELQDIEVPESFSGELECIITPENIEGKWYHKGVELKSNGKYTITSRRGRQNLTVKDVTKEDQGEYSFVVDGKKTTCKLKMKPRPIAILQGLSDQKVCEGDIVQLEVKVSLENVEGVWMKDGEEVQPGDRVHIVIDKQSHMLLIEDMTKEDAGHYSFTIPSLGLSTHGRVSVYSVDVITPLKDVNVLEGTKAVLECKVSVPDVTSVKWYLNDEQIKPDDRVHAIVKGTKQRLVINRTHASDEGPYKLVVGRVETSCDLSVEKIKIIRGLRDLTCTETQNVVLEVELSHSGIDVLWNFKDKEIKPSSKYKIEAHGKIYKLTVLNMMKDDEGEYTFYAGENRTSGKLTVAGGAISKPLTDQTVAESQEAVFECEVANPDSEGEWLKDGKHLPLSKTIRSESDGRKRRLIIAATKLDDIGEYTYKVATSKTSAKLKVEAVKIKKTLKNLTVTETQDAVFTVELTHPNVKGVQWIRNGVVLESSDKYTVSVKGTVYSLRIKNCAVADESVYGFKLGKLGASARLHVETVKIIKKPKDVTALENATVSFEVSVSHDTVPVKWFHKNVEIKPSDKHRLVSERKVHKLMLQHISPSDAGEYTAVVGQLECKAKLFVETLHITKTMKNIEVPETKTASFECEVSHFNVPSMWLKNGVEIEMSEKFKIVVQGKLHQLIIMNTSTEDSAEYTFVCGNDQVSATLKVTPIMITSMLKDINAEEKDTITFEVTVNYEGISYKWLKNGVEIKSTDRCQMRTKKLTHSLNIRNVHFGDAAEYTFVAGKATSTATLYVEARHIEFRKHIKDIKVLEKKRAMFECEVSEPDITVQWMKDGQELQLVDRIKIQKEKYVHRLLIPSTRMSDAGKYTVVAGGNMSSANLFVEGRDVRIRSIKREVQVIEKQRAVVEFEVNEDDVDAHWYKDGIEINFQVQERHQYVVERRIHRMFISETRHSDAGEYTFVAGRNRSSVTLYVNAPEPPQILQELQPITVQSGKPARFCAVISGRPQPKISWYKEEQLLSTGFKCKFLHDGQEYTLLLIEAFPEDAAVYTCEARNDYGVATTSASLSVEVPEVVSPDQEMPVYPPAIVSPLQDAVTSEGRPAHFQCRVSGTDLKVSWYSKDKKIKPSRFFKMTQFEDTYQLEVAEAFPEDEGIYTFVASNAVGQVSSTATLRLEAPEAMLHEQIEMEMKEFSISLLSGKEERPQTSSWDLQLFDINETLEPLSEPSVYSPKFDSKKEGNAPVFIKEVSNAEISIGDVAKLFVTVTGIPTPQIQWFFNGAMLTPSADYKFVFDGNDHSLIILFTKLEDEGEYTCIASNEYGQAMCSAYLKINSEAEGHEEPESAEKSLEKLQGPCPPYFLKELKPVHCVQGLPAIFEYVVLGEPAPTVLWFKENKQLCTNVYYTIIHNPDGSGTFIVNDPQKEDGGLYVCKAENVWGGSTCAAELFVLLEDTDMTDATCKAAPTPEAPEGFPHTSVKDPAVETFDSEQEVVTFVKDAILKASLIAEEKQQFSYEHVVKTNELSSQVTLKAEQLQSTVILEHDMPTPESTRELLSISGTIHVQPIKELPPSLQLQIAQSQDTLPREDTLMCQEPESQVVLSDTEKIFPSFMSIEEISLSTVESLQTLLAEPEESYPQPLIKETPAHSYPTSVAEEVLLSKDKTVSAVDRGQRETSQKQESQNALFLNQNLAEGHAQSLQGPDVTVSRVSSEHTCTESEILMESVDQLDSAGQDFAARIEEGQSLRFPLACEEKQVLLKEEHSDTLALPLNQTTEYKKEPMAVNGVQEVQGSDFLSKESLLPGIPEEQRLNLKTQIRSALQAAVASEQLSLFSEWLRNIEQVEVKAIDFTQEPNCIMCTYLITSVKSLTEEVTVTIKGIDPQMADLKTELKEALCSICEEMNILTAEEPGIEKGATVVLQEDVSFSSSQKLEAITEPEAESKYLVSKEEISYFKVESQVKAVGTTTASAAVSDEKQDELPKPSEEKEKVSEGGTEEVGTVEIQEAEDEEDRKLGEDGPDVQTPLVDTIAEEGDIISLTSCITNAKEVNWYFESKLVPSDEKFKCLQDQNTYTLVIDKVNREEHQGEYTCEALNDNGKATTSAKLTVVKRAAPVIRRRIEPLEVALGHLAKFTCEIHSAPNVRFQWFKAGREIYESDKCSIRSANYVTTLEILRTQVVDCGEYTCKASNEYGSVSCTATLTVTEAYPPTFFSRPKSVTTFVGKAAKFLCTVTGTPVIETIWQKDGMALSPSPTCKISDVDNKHILELSNLTVHDKGVYSCKASNKFGADTCQAELDIIDKPHFIKELEPVQSAINKKIHLEGQVDEDRKVTITWSKNGQKLPPGKDYKIYFEDKIASLEIPLAKLKDSGTYVCTASNEAGSSSTSATVTIREPPSFVKKVDPSYLMLPGESARLHCRLKGSPVIQVTWFKNNKELTESNTIRMSFVNSEAVLDITDVKVEDSGTYSCEAVNDVGSDSCSAEIVVKEPPSFIKTLEPADIVRGTNALLQCEIAGTGPFEISWFKDKKQIRSSKKYRLFSQKSTVSLEIFSFNSADVGDYECVVANEVGKCGCVATHLLKVEPPTFVKKVDDFTALAGQTVTLQAAVRGSEPISVTWMKGQEIIKEDGKIKMSFANGVAVLIIPDVQISFGDKYTCLAENEAGSQTSVGELIVKEPAKIIERAELIQVTAGDPATLEYTVAGTPELKPKWYKDGRPLVASKKYRISFKNNVAQLKFYSAELHDSGQYTFEISNEVGSSSCETTFTVLDRDIAPFFTKPLRNVDSVVSGTCRLDCKIAGSLPMRVSWFKDGKEVTSSDRYRIAFVEGTASLEISRVDMSDAGNFTCRATNSVGSKDCSGALIVQEPPSFVTKPASKDILPGSAVFLKSTFQGSTPFTIRWFKGDKELVSGGNCYINKEALESSLELYSVKTTDSGTYTCKVSNVAGAVECSANLFVKEPATFVERLELSQLLKKGDTTQLACKVTGTPPIKITWFANDREIKESSKHKMSFVESTAVLRLTDIAVEDSGEYMCEAQNEAGSDHCSSILIVKESPYFTKEFKPIEVLKEYDVMLLAEVAGTPPFEITWFKDNTTLRSGRKYKTFIQDRLVSLQILKFVAADVGKYQCRVTNEVGSSTCSARVTLREPPTFVKKIESTSSLRGGTAAFQATLKGSLPITVTWLKDNEEITEDDNIRMTFENNVASLYLSGIEVKHDGKYVCQAKNDAGIQRCFAVLSVKEPATIIEEAVSIDVTQGDPATLQVKFSGTKEITAKWFKDGQELTLGQKYKISVTDTVSILKIISTEKRDSGEYTFEVQNDVGRSSCKASINVLDLIIPPSFTKKLKKMDSIKGSSIDLECIVAGSHPISIQWFKDDQEITASEKYKFSFHDNTAFLEISQLEGSDSGTYTCSATNKAGHNQCSGHLTVKEPPYFLEKPQSQDVNPNTRVQLKALVGGTAPMTIKWFKDNKELHSGAARSVWKDDTSTILELFSAKAADSGTYICQLSNDVGTATTKASLFVKEPPQFIKKPSPVLVLRNGQSTTFECQITGTPEIRVSWYLDGNEITAVEKHGISFIDGLATFQISGARVENSGTYVCEAQNDAGTASCSIELKVKEPPTFIRELKPVEVVKDSDVELECEVMGTSPFQVTWLRNNKEIRSSKKYTLTDRVSVFNLNINRCDPSDTGDYQCIVSNEGGSCSCSARVSLKEPPSFIKKIENITTVLKSSATFQSTVAGSPPISITWLKDDQILDEDDNVHISFVNNVATLQIRSVDNGHSGRYTCQAKNESGVERCYAFLLVQEPAQIIEKAKSVDVTERDPVTLECVVAGTPELKVKWLKDGKQIVPSRYFSMSFENNVASFRIQSVMKQDSGEYTFKVENDFGSSSCDAYLRVLDQNIPPSFTKKLTKMDKVLGSSIHMECKVSGSLPISAQWFKDGKEISTSAKYRLVCHENTVSLDVNNLELEDTANYTCRVSNVAGDAACSGILTVKEPPSFLVKPERQQAIPDSTVEFKAVLKGTPPFKIKWFKDDVELASGPKCFIGLEGSTSFLNLYSVDASKTGQYTCQVTNDVGSDSCTTTLLVTEPPKFVKKLEATKIVKAGDSARLECKITGSPDIRVVWYRNEHELPASDKYRMAFIDSVAVLQMNYLGTEDTGDFICEAQNPAGSTSCSTKVIVKEPPVFSSFPPVVETLKNAEVSIECELSGTPPFEVVWYKDKRQLRSSKKYKIASKNFHASIHILNVDTLDIGEYHCKAQNEVGSDTCICIVKLKEPPRFVSKLNSLTVVAGEPAELQASIEGTQPISVQWLKEKEEVVRESENIRITFVENVATLQFSKAEPANAGKYICQIKNDGGMRENMATLSFISEPAVIVEKAGSMTVTVGETCTLECKVAGTPELSVEWYKDGKLLTSSQKHKFSFYNKISSLKILSVEKQDAGTYTFQVQNNVGKSSCTAVVDVSDRMVPPSFTRRLKDTIGVLGTSCILECKVAGSSPISVAWFHGKTKIVSGAKYQTTFSDNVCTLQLNSLDSSDMGSYTCVAANVAGSDECRAVLAVQEPPSFVKEPEPLEVLPGKNITFTSVIRGTPPFKVGWFRGARELVKGDRCNIYFEDTVAELELFNVDISQSGEYTCVVSNNAGQTSCTTRLFVKEPAVFVKKLSDHSVEPGKSIILESTYKGTLPISVTWKKDGFNITPSEKCSIVTTEKTCILEILNSTKRDAGRYSCEIENEAGRDVCEALVSTLEPPYFVTELEPLEASVGDSVSLQCQVAGSPEITVSWYKGDTKLRPTPEYRTYFTNNVATLVFNKVNINDSGEYTCKAENSIGTASSKTVFRIQERQLPPSFARQLKDIEQTVGLPVTLTCRLNGSAPIQVSWYRDGVLLRDDENLQTSFVDNVATLKILQTDLSHSGQYSCSASNPLGTASSSARLTAREPKKSPFFDIKPVSIDIIAGESADFECHVTGAQPMRITWSKDNKEIRPGGNYTITCVGNTPHLRILKVGKGDSGQYTCQATNDVGKDMCSAQLSVKEPPKFVKKLEASKVAKQGESIHLECKISGSPEIKVSWFRNDSELHESWKYNMSFVDSVAVLTINEASAEDSGDYICEAHNGVGDASCSTALTIKAPPVFTQKPSPIGALKGSDVVFQCEISGTPPFEVVWVKDRKQVRSSKKFKITSKNFDASLHILNLEAADVGEYYCKATNEVGSDTCVCTLKFKVEPPRFVKKLSDTSTLVGDAVELRAVVEGFQPISVVWLKDKGDVIRESENTRISFVDNVATLQLGSPEASDSGKYVCQIKNDAGMRECSAILTVLEPARIIEKPEPMTVTTGNAFALECVVTGTPELSAKWFKDGREIAADSKHHITFVNKVASLKIPCAEMSDKGLYSFEVKNSVGKSTCTVSVHVSDRIVAPSFIRKLKDINAIVGASVVLECRVSGSAPISVGWFQDGNEIVSGPKCQSSFSENVCTLNLSFLEPSDTGTYTCVAANVAGSDECSAVLTIQEPPSFEQTPDSVEVLPGTSLTFTSVIRGTPPFKVKWFKGSRELVSGESCSISLEDFVTELELFEVEPLQSGDYSCLVTNDAGSASCTAHLFVKEPATFVKRLADFSVETGSPIVLEATFTGTPPISVSWMKNEFALTQSQNCSITMTEKSTILEILDSTIEDYAQYSCLIENEAGQDICDAVVSVLEPPYFIEPLEHVEAVIGEPITLQCKVDGTPEIRISWYKEHTKLRSAPAYKMQFKNNVASLVINKVDHSDVGEYTCKAENIVGAVASSSVLVIKERKLPPSFARKLKDVQETLGFPVAFECRINGSEPLQVSWYKDGVLLKDDANLQTSFVHNVATLQILQTDQSHVGQYNCSASNPLGTASSSAKLVLLEHEVPPFFDLKPVSVDLALGESGSFKCHVTGTAPMKITWAKDNREIRPGGNYKMTLVENTATLTVLKIGKGDAGQYTCYASNVAGKDSCSAHLGVQASIEPPRFIKKLEPSRIVKQDESTRYECKIGGSPEIKVLWYKGETEIQESSKFRMSFVDSVAVLEMHGLSVEDSGDYTCEACNAAGSASSTTSLKVKALEPPIFRKKPHPVETLKGADVHLECELQGTPPFQVSWHKDKRELRSGKKYKIMSENFLTSIHILSVDAADVGEYQCKATNDVGSDTCVGSITLKAPPRFVKKPSDVSTIVGEEVQLQATVEGAEPISVVWFKDKGEIVRESDNIWISYSENTATLQFSRAETANAGKYTCQIKNDAGMQECSATVSILEPAAIVEKPESITVTTGDTCTLECSVTGTPELTTKWFKDGKELTSDNKYKISFFNKVSGLKIINVAPSDSGVYSFEVQNPVGKDSCTASVQVSDSDRIVPPSFTRRLKETNGLSGSSVVMECKVYGSPPISVSWFHERNEISSGRKYQTTLTDNTCALTVNMLEESDAGNYTCIATNVAGSDECSAPLTVREPPSFVQKPDPMDVLTGTNVTFTSIVKGTPPFSVSWFKGSTELVPGDTCNVSLEDSVAELELFDVDTSQSGEYTCIVTNEAGKVSCTTHLYVKAPARFVKKLNDYSIEKGKPLILEGTYTGTPPISVTWKKNGINVTPSQRCNITTTERSAILEIPSSTVEDAGQYNCYIENTSGKDSCSAQILILEPPYFVRQLEPVKVTVGDSASLQCQLGGTPEIAVSWFKGDTKLRPTATYKMHFRNNIATLVFNQVDSNDSGEYICRAENSVGEVSSSTFLTVQEQKLPPSFSRQLRDVQETVGLPVVFECAVSGSEPISVSWFKDGRPVKDSPNIQASFLDNVATLNIFQTDRSFAGQYSCTATNPIGSASSSARLILTEGKNPPFFDIPLAPVDAVVGESADFECHVTGTQPIKVAWAKDNREIRSGGNYQISYLENSAHLTILKVDKGDSGQYTCYAVNEVGKDSCTAQLNIKERLIPPSFTKKLSETVEETEGNSFKLEGRVAGSQPISVAWYKNNIEIHPTSNCEITFKNNTLLLQIKRAGMDDAGLYTCKVSNDAGSALCTSSIVIKEPKKPPVFDQHLTPVTASEGEFVQLSCHVWGSEPIRIQWLKAGREIKPSDRCSFSFANGTAVLELKDVTKADAGDYVCKASNVAGSDTSKSKVTIKDKPAAVPAAKKAAVDGKLFFVSEPQSIRVVEKTTATFIAKVGGDPIPNVKWTKGKWRQLNQGGRILIHQKGDEAKLEIRDTTKTDSGLYRCVAFNKHGEIESNVNLQVDERKKQEKIEGDLRAMLKKTPVLKKGAGEEEEIDIMELLKNVDPKEYEKYARMYGITDFRGLLQAFELLKQTEGEETHRLEIEEIEKSEKDEKEFEELVSFIQQRLSQTEPVTLIKDIENQTVLKDNDAVFEIDIKINYPEIKLSWYKGTEKLEPSDKFEISIDGDRHTLRVKNCQLKDQGNYRLVCGPHIASAKLTVIATEPAWERHLQDVTLKEGQTCTMTCQFSVPNVRSEWFRNGRILKPQGRYKTEVEHKVHKLTIADVRAEDQGRYTCKHEDLETSAELRIEAEPIQFTKRIQNIVVSEHQSATFECEVSFDDAIVTWYKGPTELTESQKYNFRNDGRCHYMTIHNVTPDDEGVYSVIARLEPRGEARSTAELYLTTKEIKLEMKPPDIPDSRVPIPTMPIRAIPPEEIPPTAVPPIPLLLPLPEEKKPPEKRVEVTKKAVKKDAKKVVAKPKEEAPPPKVIEVPKKPPRPTALIPAEAPEIIDVSSKAEEVKITTITRKKEVQKEKEAVYERKQAVYEEKKVYIESLEEPYDELEVETYTEPYEEPYYEEPEEDYEETQVEAKREVHEEWEEDFEEGQEYYEREEGYDEGEEEWEETYQEREVVQVQKEVYEESRERKIPAKVPEKKELPPPKVVKKPVVEKIEKTSRRMEEEKVQVTKVPEVSKKIVPQKPSRTPVQEEIIEVKVPAVHTKKMVISEEKMFFAAHTEEEEEVSVTVPEVQKKTVTEEKVHVAVSKKIEPPPKVPEPPKKPEEVVPVPVPKKVEPPPAKVPEVPKKPVPEEKKPVPVPKKEPAAPPKVPEVPKKPVPEEKVPVPIAKKKEAPPAKVPEVQKRVVTEEKITIVTEREESPPPAVPEIPKKKLPEEKRPVPRKEEEVPPPKVPAVPKKPVPEEKVPVPVPVAKKAPPPRAEVSKKMVMEEKRFAAEEKLSVTVPQRVEVMRHEVSAEKEWRYSEEEERVSVSVYREEEREEEEVEVTEYEVMEEPEEYIVEEEEHFISEEVEAEPAEESFQVPEKKIIPKPKIPAKVEEPPPAKVPEAPKKIVPEKKIPAAVPKKEKVPPTKVPEEPKKPVPEKRAPPKVAKIEEPPPTKVTERHMQITQEEKVHVAVTKKVEPPRPKVPEEPKRAVPEEKFPKLKPRKEEEPPAKVTELRKRAVKEEKVSIEVAKREPPAAKEVTVTAEKEWAYTKEEEAVSVEREEEYEEYEEYDYKEFEEYEPTEEYDQYEEYEEREFEHYEEYKEHEEYVTEPEKPVPVKPIQEEPVPTKPKAPPAKVPKKVIPEEKVPVPIPKKLKPPPPKAREEAKKVVEEKIQISVIKREKEQVTEPAAKVPMKPKRVVTEEKVPVPKKEVAAPVRVPEVPKKEEPEEIAFEEEVVTHEEEYYEEEEEEEEYIHEEEEIITEEEVVPVKVFKVPEVPKKPVPEEKKPVPVPKKKEAPPAKVPEIPKKPEEKVPVPVPKKEKAPPAKVPEVPKKPVPEEKVPVPEEKVPVPVPKKVEAPPAKVPEVPKKPVPEKKVPVPAPKKVEAPPAKVPEVPKKVLPEEKKPTPIRKKVEPPPPKVPKKREPVPVPIPAALLREEKVVHKEEIVVEEEEVLPEEEEISPEEEVPLEEEEEEEEVLPEEEEVPPEEEEVPPEEEEVPPEEEEFVPEEEVVPEKEEVLPEIKPKVPVPARVPEVKKKVPEKKVIIPKKEEVPPAKVPEVPKKVEEKRIIVPEEEEVPPVEVFEEPEEPIPEEEIPEEAPIVEEVEEEAPPRVPEVVKKAVPEAPTPVPKKVEVPPAKVPKKVPEEKPPVPVQKKEAPPAKVPEVPKKVPEKKVPVPKKEVVPPAKGRAVLEEKVSVAFHKEEVVEERTELEIVEAQEEALEEEFHEVEEYFEEEEFHEVEEFLKVEKYRAEEEVHRAEEVHRVIEVLEAEEEEAYEKPKAPPKGPEISEKVIPPKKPPTKVVPRKEPPAKVPEVPKKIVVEEKVHVPEEPKVAPAKVPEAPKEVVPEKKVPAAPPKKPEVPPVTVPEAPKEVVPEKKVPVVPPKKPEVPPAKVPEVPKAAVPEKKVPEAIPPKPESPPPAVPEAPKEVVPEKKVPVMPPKKPEVPPAKVPEAPKEVVPEKKVPVMPPKKPEVPPAKVPEVPKAAVPEKKVPEAIPPKPESPPPAVYEEPEEIAPEEPPVEVVEEPEPVPAPPPKVTVPPKKPVPEKKPPAVVAKKPEPPPAKVPEVPKEVVPEKKVPPVVPKKPEVPPPKVPEVPKEVVPEKKVAVPKKPEVPPAKVPEVPKKPVLEEKPAIPIPEKVESPPPEEEEEPVPVVEEEEPVPVVEEEEPVPVVEEVEPEAPPPAVPEEPKKIVPEKKVPVIKKPEPPPPKEPEPEKKVIEKPKLKPRPPAPPPAPPKEDVKEKIFQLKAVSKKKVPEKPAVPEKVELTPLKVAGGEKKVRKLLPEPKPQPKEEVILKSVLRKRPEEEEPKVEPKKVEKIKKPAVPEPPPKAVEEVEAPPAVTKKERKIPEPTKVPEIKPPIPLPAPEPKPKPEAEVKIIKPPPVEPPPTPIAAPVTVPVVGKKAEAKAPKEEAAKPKGPIKGVAKKTPSPIEAERKKLRPGSGGEKPPDEAPFTYQLKAVPLKFVKEIKDIVLTEAESVGSSAIFECLVSPSTAVTSWMKDGSNIRESPKHRFIADGKDRKLHIIDVQLSDAGEYTCVLRLGNKEKTSTAKLIVEELPVRFVKTLEEEVTVVKGQPLYLSCELNKERDVVWRKDGKIVVEKPGKIVPGVIGLLRALTINDADDSDAGTYTVTVENANNLECSSCVKVVEVIRDWLVKPIRDQHVKPKGTAVFTCVIAKDTPNIKWYKGYDEIPWEPTDKTEIIRDGNHIHLKVKNAMPEDIDEYAVEIEGKRYPAKLTLGEREVELLKPIEDVTIYEKESASFDAEISEVDVPGQWKLKGELLRPSPTCEIKAEDGKRFLTLHNVKLDQAGEVLYQALNAVTTAILTVKEIELDFAVPLKDVTVPEKRQARFECVLTREANVIWSKGPDIIKSSDKFDIITDGKKHILVINNSQFDDEGVYTAEVEGKKTSARLFVTGIRLKFISPLEDQTVKEGETATFVCELSHEKMHVVWFKNDAKLHTSRTVLISSEGKTHKLEMREVTMDDISQIKAQVKDLSSTANLKVIEADPYFTVKLHDKTGVEKDEIVLRCEVSKDVPVKWFKDGEELLPSPKHSIKADGLRRILKIKKADLKDKGEYVCDCGTDTTKANVTVEARLIKVEKPLYGVEVFVGETARFEIELSEPDVHGQWKLKGEPLTASPDCEIIEDGKKHILVLYNCRLDMTGKVSFQAANAKSAANLKVKELPLIFITPLSDVKVFEKDEAKFECEVSREPKTYRWLKGTQEITGDDRIELIKDGTKHSLVIKSAAFEDEAKYIFEAEDQHTSGKLIIEGIRLKFLTPLKDVTAKERESAVFTVELSHDNIRVRWFKNDQRLHTSKFVSMDDEGKTHSITFRNLSIDDTSQIKVEAMGLSSEAKLTVLEGDPYFTGKLQDYTGVEKEEVILQCEISKADAPVKWFKDGQEIKPSKNAVIKADGKKRMLILKKPLKSDIGQYTCDCGTDKTSGKLNIEDREIKLVRPLYSVEVMETETARFETEISEDDIHANWKLKGEALLQTPECEIKEEGKTHFLILHNCRLDQTGGVDFQAANVKSSAHLRVKPRVIGLLRPLKDITVTAGETATFDCELSYEDIPVEWYLRGKKLEPSDKVVMRSEGRVHTLTLRDVKLEDAGEVQLVAKDFKTQAKLFVKEPPVEFTKPLEDQTVEEEATAVLECEVSRENAKVKWFKNGTEILKSKKYEIVADGRVRKLIIHGCTPEDIKTYTCDAKDFKTSCNLNVVPPHVEFLRPLTDLRVKEKEMARFECEISRENAKVHWFKDGAEIKKGKKYDIISKGAVRILVINKCLLDDEAEYSCEVRTARTSGMLTVLEEEAVFTKNLANIEVSETDTVKLVCEVSKPGAEVTWYKGDEEIIETGRYEILTDGRKRILIIQNAHLEDAGNYNCRLPSSRTDGKVKVHELAAEFISKPQNLEILEGEKAEFVCSISKENFEVQWKRDDKTLESGDKYDVIADGKKRVLVVKDATLQDMGTYVVMVGAARAAAHLTVIEKLRIIVPLKDTRVKEQQEVVFNCEVNTEGAKAKWFRNDEAIFDSSKYIILQKDLVYTLRIRNAQLDDQANYNVSLTNHRGENVKSAANLIVEEEDLRIIEPLKDIETMEKKSVTFWCKVNRLNVTLKWTKNGEEVAFDNRVLYRIDKYKHSLIIKDCGFPDEGEYVVTAGQDKSVAELLIIEAPTEFVEHLEDQTVTEFDDAVFSCQLSREKANVKWYRNGREIKEGKKYKFEKDGSIHRLIIKDCRLDDECEYACGVDDRKSRARLFVEEIPVEIIRPPQDILEAPGADVVFLAELNKDKVEVQWLKNNMIIVQGDKHQMMSEGKIHRLQICDIKPRDQGEYRFIAKDKEARAKLELAAAPKIKTADQDLVVDVGQPLTMVVPYDAFPKAEAEWFKENEPLSSKTVDTTAEQTSFRILKAKKEDKGRYKVVLQNKHGKAEGFINLKVIDVPGPVRNLEVTETFDGEVSLAWEEPLTDGGSKIIGYVVERRDIKRKTWVLATDRADSCEFTVTGLQKGGVEYLFRVSARNRVGTGEPVETDSPVEARSKYDVPGPPLNVTVTDVNRFGVSLTWEPPEYDGGAEITNYVIELRDKTSIRWETAMTVRAEDLSATVTDVVEGQEYSFRVRAQNRIGVGKPSAATPFIKVADPIERPSPPVNLNASDQTQSSVQLTWEPPLKDGGSPILGYIIERCEEGKDNWIRCNKKLVPELTYKVTGLQKGNKYLYRVSAENEAGVSDPSEILGPLTADDADAEPTMDLSAFKDGLEVIVPNPIKILVPSTGYPRPTATWSFGDKVLEAGDRVKMKTLSAYAELVISPSERPDKGIYTLKLENRAKAISGEIDVNVIARPSAPRELKFGDITKDSVHLTWEPPEDDGGSPLTGYVIEKREVSRKTWTKVIDSVTDLEFTVPDLLQGKEYLFKVCACNKCGPGEPAYVDEPVNMSAPATVPDPPENVKWRDRTAKSIFLTWDPPKHDGGSRIKGYIVEKCPRGSDRWVACGEPVADTKMEVTGLEEGQWYAYRVKALNRLGASKPSKPTEEIQAIDTQEAPEIFLDVKLLAGITVKAGTKIELPATVTGKPEPKITWTKADMLLKQDKRITIENVPKKSTVTIMDSKRSDTGRYIIEAVNVCGRATAVVEVNVLDKPGPPAAFDITDVTNESCLLTWNPPRDDGGSKITNYVVERRATDSDMWHKLSSTVKDTKFKATKLTPNKEYIFRVAAENMYGVGEPVQATPITAKFQFDPPGPPTRLEPSDITKDAVTLTWCEPDDDGGSPITGYWVERLDPESDKWVRCNKMPIKDTTYRVKGLTNKKKYRFRVLAENLAGPGKPSKSTEPILIKDAIDPPWPPGKPVVKDIGRTSLMLNWTKPEHDGGAKIDSYVIEMLKTGTEDWVRVAEGVPTTQHLLPGLMEGQEYSFRVRAVNKAGESEPSEPSDPVLCREKLYPPSPPRWLEVINITKNTADLKWTVPEKDGGSPITNYIVEKRDVRRKGWQTVDTTVKDTKCTVTPLTEGSLYVFRVAAENAIGQSDYCEVEDSVLAKDTFTTPGPPYALAVVDVTKRHVDLKWEPPKNDGGRPIQRYVIEKKEKLGTRWVKAGKTSGPDCHFRVTDVIEGTEVQFQVRAENEAGVGHPSEPTEILKIEDPTSPPSPPLDLHVTDAGRKHIAIAWKPPEKNGGSPIIGYHVEMCPVGTEKWMRVNSRPIKDLKFKVEEGVVPDKEYVLRVRAVNAVGVSEPSEISENVVAKDPDCRPTIDLETHDIVVIEGEKLSIPVPFRAVPVPTVSWHKDGKEVKASDRLTMKNDHISAHLEVPKSVRADAGIYTVTLENKLGSATASINVKVIGLPGPCRDLKASDVTKSSCKLTWEPPEYDGGSPILHYVLERREAGRRTYIPVMSGENKLSWTVKDLIPNGEYFFRVKAVNKIGGGEYIELKNPVIAQDPKQPPDPPVDVEVHNPTAEAMTITWKPPLYDGGSKIMGYIIEKIAKGEERWKRCNEHLVPVLTYTAKGLEEGKEYQFRVRAENAAGISEPSRATPPTKAVDPIDAPKVIMKTSLEVRRGDEIALDAIISGSPYPTITWLKDESIITPEEIKKRVEPLVRRRRGEVQEEQPFVLPLTQRLSIDNSQKGESQLRVRDSVRPDHGLFMIKAENDHGIAKAPCTVCVLDIPGPPINFVFEDMRKTSVLCKWEPPLDDGGSEILNYTLEKKDKTKPDSEWMVVTSTLRHCKYSVTKLIEGKEYLFRVRAENRFGPGPPCVSKPFMAKDPFEPPDAPDKPIVEDVTSNSMLVTWNEPKDNGSPILGYWLEKREVNSTHWSRVNRNLLNSLKTKVDGLLEGLTYVFRVCAENAAGPGKFSPPSDPKTAQDPISPPGPPVPRVTDTSSTTIELAWEPPAFNGGGEIVGYYVYKQLVGTNEWSRCTEKMIKPREYTVREIREGADYKLRVTAVNVAGEGPPGETEPVTVAEPQAEPPTVELDVSVKGGIQIMAGKTLRIPAVVTGRPVPTKVWTIEEGELDKDRVEIENVGTKSELIIKNALRKDHGRYVITATNSCGSKFAAARVEVFDVPGPVLDLKPVVTNRKMCLLNWSDPEDDGGSEITGFIIERKDAKMHTWRQPIETERSKCDITGLLEGQEYMFRVIAKNKFGCGPPVEIGPILAVDPLGPPTSPERLTYTERTKSTITLDWKEPRSNGGCPIQGYIIEKRRHDKPDFERVNKHLCPTTSFLVEDLDEHQMYEFRVKAVNEIGESEPSLPLNVVIQDDEVPPTIKLRLSVRGDTIKVKAGEPVNIPADVTGLPMPKIEWSKNETVIEKPTDALKITKEEVSRSEAKTELSIPKATREDKGTYTVTASNRLGSVFRNVHVEVYDRPSPPRNLAVTDIKAESCYLTWDAPLDNGGSEITHYIIDKRDASRKRAEWEEVTNSAVERRYGIWKLIPNGQYEFRVRAVNKYGISDECKSDKVVIQDPYRTPGPPGKPKVLERTKGSMLVSWTPPLDNGGSPITGYWLEKREEGGAYWSRVSRAPITKVGLKGVEFNVPRLIEGVKYQFRAMAINAAGVGPPSEPSDPEVAGDPIYPPGAPSRPEVKDKTKSSITLAWKPPAKDGGSPIKGYIVEMQEEGTTDWKSVNEPDKLLPTCECVVPNLKELKKYRFRVKAVNEAGESEPSDTTGEIPATDIQEVPEVFIDIGAQDCLICQAGTQIRIPAVIKGRPTPKSSWEFDGKAKKAMKDGVHDIPEDAQLETAENSSVIIIPECKRSHSGKYSITAKNKAGQKTANCRVKVMDVPGPPKDLKVSDITRGSCRLSWKMPDDDGGDRIKGYVIEKRTIDGKAWTKVNPNCVSTSFVVPDLIAGQEYFFRVRAENRFGVGAPAETIQRTTARDPIYPPDPPIKLKIGLVTKNTVHLSWKPPKNDGGSPVTHYIVECLAWDPTGTKKEAWRQCNKRDVEELEFTVEDLIEGGEYEFRVKAVNAAGVSKPSATVGPVIVKDQTCPPAIELKEFMEVEEGTDVNIVAKIKGVPFPTLTWFKAPPKKPDNKEPIVYDTHVNKLVVDDTCTLVIPQSRRSDTALYTITAVNNLGTASKEMRLNVLGRPGPPVGPIKFESISADQMTLSWLPPIDDGGSKITNYVIEKREANRKTWVRVSSEPKECTYTIPKLLEGHEYVFRIMAQNKYGIGEPLDSEPETARNLFSVPGAPDKPTVSSVTRNSMTVNWEEPEYDGGSPVTGYWLEMKDTTTKRWKRVNRDPIKAMTLGVSYKVTGLIEGSDYQFRVYAINAAGVGPASLPSDPATARDPIAPPGPPFPKVTDWTKSSADLEWSPPLKDGGSRVTGYIVEYKEEGKEEWEKAKDKEVRGTKLVVTGLKEGAFYKFRVRAVNIAGIGEPGEVTDAIEMKDRLELPDLQLDASVRDRIVVHAGGVIRIIAYVSGKPPPTVTWNMNERALPQEATIETTAISSSMVIKNCQRSHQGVYSLLAKNAAGERKKTIIVDVLDVPGPVGIPFLAHNLTNDSCKLTWFSPEDDGGSPITNYVIEKREADHRAWTPVTYTVTRHNATVQGLIQGKAYFFRIAAENSIGMGPFVETTDALVIRDPITVPERPEDLEVKEVTKESVTLTWNPPKYDGGSDIINYVLESRLIGTEKFHKVTSDNLMSRKYTVKGLKEGDTYEYRVSAVNIVGQGKPSFCTKPITCKDELAPPTLDLDFRDKLTIRVGEAFALTGRYSGKPKPKVSWFKDEADVLEDDRTHIKTTPTTLALEKLKAKRSDSGKYSVVVENSTGSRKGVCQVNVVDRPGPPVGPVIFDEVTKDYMVISWKPPLDDGGSEITNYIIEKKEVGKDVWMPVTSASAKTTCKVSKLLEGKDYIFRIHAENLYGISDPLVSDSMKAKDRFRVPDAPDQPIVTEVTKDSALVSWNPPHDGGKPITNYILEKRETMSKIWARVTKEPIHPYTKFRVPDLLEGCHYEFRVSAENEIGIGDPSPPSKPVFAKDPIAKPSPPVNPEAIDTTCNSVDLTWQPPRRDGGSKILGYIVEYQKVGDEEWKRANHTPESCPETNYKVTGLRDGQSYKFRVIAVNAAGESDPAHVPEPVLVKDRLEPPELILDANMAREQHIRVGDTLRLSAIIKGVPFPKVTWKKEDRAAPTKARIDVTPVGSKLEIRNAAHEDGGIYSLTVENPAGSKTVSVKVLVLDKPGPPRDLEVSEIRKDSCYLTWKEPLDDGGSVITNYVVERKDVASTEWSPLSTTSKKKSHLAKHLNEGNQYVFRVAAENQYGRGPFVETPKPIKAVDPLHPPGPPKNLHHVDVDKTEVSLVWNKPDRDGGSPITGYLVEYQEEGTPDWIKFKTVTNLACVVTGLQQGKTYRFRVKAENIVGLGLPDTTIPIECQEKLVPPSVELDVKLIEGLVVKAGTTVRFPAIIRGVPIPTAKWTTDGNEIKTDEHYTVETDNFSSVLTIKNCLRKDTGEYQITVSNAAGTKTVAVHLTVLDVPGPPTGPINILEVTPEYMTISWLPPKDDGGSPVINYIVEKKDTKKDTWGVVSSGSSKTKLKVPHLQKGYEYVFRVKAENKIGIGPPLDSVPTVAKHKFSPPSPPGKPVVTDITENAATVAWTLPKSDGGSPITGYYLERREVTGKWVRVNKTPLVDLKFRVTGLYEGNTYEFRVFAENLAGLSGPSPSSDPIKACRPIKPPGPPINPKLKDKTRESADLVWTKPLSDGGSPILGYVVECQKAGTTQWDRINKDELIRQCAFRVPGLIEGNEYRFRIKAANIVGEGEPRELAESVIAKDILHPPEVELDVTCRDVITVRVGQTIRILARVKGRPEPDITWSKEGKALVRDKRVNIIHELPRVELQIKEAVRADHGKYIISAKNSSGHAQGFAIVNVLDRPGPCQNLKVTNVTKENCTISWENPLDNGGSEITNFIVEYRKPNQKGWSIVASDVTKRLIKANLLANNEYYFRVCAENKVGVGPTIETKTPILAINPIDRPGEPENLHIADKGKTFVYLKWRRPDYDGGSPNLSYHVERRLKGAADWERVHKGSIKETHYMVDKCVENQIYEFRVQTKNEGGESDWVKTEEVVVKEDLQKPVLDLKLSGVLTVKAGDTIRLEAGVRGKPFPEVSWTKDKDATDLTRSPRVKIDTSGDSSKFSLTKAKRSDGGKYVVTATNTAGSFVAFATVNVLDKPGPIRNLKITDVCSDRCSLRWDPPEDDGGCEIQNYILEKCESKRMVWSTFSSTILTPGTTVTRLIEGNEYIFRVRAENKIGTGPPTETKPVIAKTKYDKPGRPDPPEVTKVSKEEMTVVWAPPEYDGGKSITGYYLEKKEKHSTRWVPVNKSAIPERRLKVQNLLPGHEYQFRVKAENEVGIGEPSLPSRPVVAKDPIEPPGPPTNLKVVDTTKSSITLGWGKPVYDGGAPIIGYVVEMRPKKADMSPDEGWKRCNAAAQLVRMEFTVTSLDENQEYEFRVCAQNQVGIGRPAELKDAIKPKEILEPPEIDLDASMRKLVTVRAGCPIRLFAIVRGRPAPKVTWRKVGIDNVVRKGQVDLVDTMAFLVIPNSTRDDSGKYSLTLVNPAGEKAVFVNVRVLDTPGPVSDLKVSDVTKTSCHISWAPPENDGGSQVTHYIVEKREAERKTWATVTPEVKKTSFHVTNLVPGTEYFFRVTAVNEYGPGVPTDVPKPVLATDPLSEPDPPRKLEVTEMTKNSAVLAWLPPLRDGGAKIDGYIVSYREEEQPADRWTEYSVVKDLSLVVTGLKEGKKYKFRVAARNAVGVSLPREAEGVYEAKEQLLPPKILMPEQITIKAGKKLRIEAHVYGKPNPVCKWKKGEDDVVTSSHLAVHKAENSSVLIIKDVTRKDSGYYSLTAENSSGTDTQKIKVIVMDAPGPPQPPFDISDIDADACSLSWHIPLEDGGSNITNYIVEKCDVSRGDWVTALASVTKTSCRVGKLIPGQEYIFRVRAENRFGISEPLTSPKMVAKFPFGVPSEPKNARVTKVNKDCIFVAWDRPDSDGGSPITGYLIERKERNSLLWVKANDTPVRSTEYPCAGLVEGLEYSFRIYALNKAGSSPPSKPTEYVTARTPVDPPGKPEVIDVSKSTVSLVWARPKHDGGSKIIGYFVEACKLPGDQWIRCNTSPHQIPQEEFTVTGLEENAQYQFRAIAKTAVNISQPSEPSDPVTIMAESVPPRIELSVAMKSLLTVKAGTNVCLDATVFGKPKPTVSWKKDGTLLKPSEGIKMAMKRNLCTLELFSVTRKDSGDYTITAENPSGSKSATIKLKVLDKPGPPASVKINKMYSDRAMLSWEPPLEDGGSEITNYIVDKRETSRPNWAQVSATVPITSCSVEKLIEGHEYQFRICAENKYGVGDPILTEPAIAKNPYDPPGRCDPPVISNVTKDHMTVSWKPPADDGGSPITGYLVEKRETHAVNWTKVNRKPVIERTIKATGLQEGTEYEFRVIAINKAGPGKPSDASKAVYAQDPLYPPGPPAFPKVYDTTRSSVSLTWGKPAYDGGSPIIGYLVEVKRADSDNWVRCNLPQKLQKTRFEVTGLMENTEYQFRVYAVNKIGYSDPSDVPDKHCPKDILIPPEGELDADLRKTLILRAGVTMRLYVPVKGRPPPKITWSKPNVNLRERVGLDIKSTDFDTFLRCEKVNKYDAGKYILTLENSCGKKEYTIVVKVLDTPGPPVNVTVKEISKDSAYITWDPPIIDGGSPIINYVVEKRDAERKSWSTVTTECSKTSFRVSNLEEGKSYFFRVFAENEYGIGDPGETRDAVKASETPGPVVDLKVTSVTKSSCSIGWKKPRSDGGSRIIGYVVDFLTEENKWQRVMKSLSLQYTTKDLTEGKEYTFRVSAENENGEGTPSEITAVAKDDVVAPDLDLKDLPDLCYLAKENSNFRLKIPIKGKPVPSVSWKKGEDPLATDTRVSVESSAVNTTLVVYDCRKSDAGKYTITLKNVAGTKEGTLTIKVVGKPGIPTGPIKFEEVTAEAVTLKWGPPKDDGGSEITNYILEKRDSVNNKWVTCASAVQKTTFRVMRLHEGMEYTFRVSAENKYGVGEGLKSEPIVARHPFDVPDAPPPPNIVDVRHDSVSLTWTDPRKTGGSPITGYHIEFKERNSLLWKRANKTPIRMKDFKVTGLTEGLEYEFRVMAINLAGVGKPSLPSEPVVALDPIDPPGKPEVISVTRNSVTLVWTEPKYDGGHKLTGYIVEKRELPSKSWTKANHVNVPDCAFTVTDLVEGGKYEFRVRAKNTAGAISAPSESTDTIICKDEYEAPTIVLDPTIKDGLTVKAGDTIILSAISILGKPLPKSSWSKAGKDIRPSDIVQITSTPTSSMIAVKYATRKDAGEYTITATNPFGTKSEHVKVTVLDVPGPPGPIEISNVSAEKATLTWTPPLEDGGSPIKSYVLEKRETSRLLWTVVAEDIQSCRHVATKLIQGNEYVFRVSAVNQYGKGEPVQSEPVKMVDRFGPPGPPGKPEVSNVTKNTATVSWKRPVDDGGSEITGYHVERREKKSLRWVRATKTPVSDLRCKVTGLQEGNTYEFRVSAENKAGIGPPSDASNPVLMKDVAYPPGPPSNARVTDTTKKSASLAWGKPHYDGGLEITGYVVEHQKVGDEGWIKDTTGTALRITEFVVPDLETKEKYNFRISAINDAGVGEPAVIPNVEIVEREMAPDFELDAELRRTLVVRAGLSIRIFVPIKGRPAPEVTWTKDNINLKNRANIENTESFTLLIIPECNRYDTGKFVMTIENPAGKKSGFVNVRVLDTPGPVLNLRPTDITKESVTLHWDLPLIDGGSRITNYIVEKREATRKSYSTVTTKCHKCTYKVTGLSEGCEYFFRVMAENEYGIGEPAETTEPVRASEAPSPPDSLNIMDITKSTVSLAWPKPKHDGGSKITGYVIEAQRKGSDQWTHITTVKGLECVVKNLTEGEEYTFQVMAVNSAGRSAPRESRPVIVKEQTMLPELDLRGIYQKLVIAKAGDNIKVEIPVLGRPKPTVTWKKGDQILKQTQRVNFENTATSTILNINECVRSDSGPYPLTARNIVGEVGDVITIQVHDIPGPPTGPIKFDEVSSDFVTFSWEPPENDGGVPISNYVVEMRQTDSTTWVELATTVIRTTYKATRLTTGVEYQFRVKAQNRYGVGPSITSAPVVANYPFKVPGPPGTPQVAAVTKDSITISWHEPLSDGGSPILGYHVERKERNGILWQTVSKALVPGNIFKSSGLTDGIAYEFRVIAENMAGKGKPSKPSEPILALDPIDPPGKPVPLNITRHTVTLKWAKPEYTGGFKITSYIVEKRDLPNGRWLKANFSNILENEFTVSGLTEDAAYEFRVIAKNAAGAISPPSEPSDAITCRDDIEAPRIMVDVKFKDTITLKAGEAFKLEADVSGRPPPTMEWTKDGKELENTAKLEIKIADFSTNLVNKDSLRRDGGAYTLTATNPGGFAKHIFHVKVLDRPGPPEGPLAVSEVTSEKCVLSWLPPLDDGGAKIEYYVVQKRETSRLAWTNVASEVQVTKLKVTKLLKSNEYIFRVMAVNKYGVGEPLDSEPVLAVDPYGPPDPPKNPEVTSITKDSMVVCWGHPDSDGGSEIINYIVERRDKAGQRWVKCNKKTLTDLRYKVSGLTEGHEYEFRVMAENRAGISAPSATSPFYKACDAVFKPGPPGNPRVLDTSRSSISIAWNKPIYDGGSEITGYMVEIALPEEDEWKIVTPPSGLKATSYTITNLTENQEYKIRIYAMNSEGIGEPALVPGTPKAEDRMLPPEIELDAELRKVVTIRACCTLRLFVPIKGRPAPEVKWTREHGESLDKASIESTSSYTLLIIGNVNRFDSGKYILTIENSSGSKSAFVNVRVLDTPGPPQDLKVKEVTKTSVTLTWEPPLIDGGSKINNYIVEKRESTRKAYSTVTTNCHKTSWKVDQLQEGCSYYFRVLAENEYGIGLPAETAESVKASERPLPPGKITLVDVTRNSVSLSWEKPEHDGGSRILGYIVEMQSKGSDKWVTCATVKVTEATITGLIQGEEYSFRVSAQNEKGISDPRQLSVPVIAKDLVIPPAFKLLFTTFTVLAGEDLKVDVPFTGRPTPAVTWHKDDVPLKQTTRVNAESTENNSLLTIKEACREDVGHYIVKLTNSAGEATETLNVIVLDKPGPPTGPVKMEEVTADSVTFSWGPPKYDGGSSINNYIVEKRDTSTTTWQIVSATVARTTIKACRLKTGCEYQFRIAAENRYGKSTYLTSEPVVAQYPFKVPGPPGTPFVTLSSKDSMEVHWNEPVSDGGSKVIGYHLERKERNSILWVKLNKTPIPQTKFKTTGLDEGIEYEFRVSAENIVGIGKPSKVSESYVARDPCDPPGRPEPIIVTRNSVTLQWKKPAYDGGSKITGYIVEKKELPDGRWMKASFTNVIDTQFEVTGLVEDHRYEFRVIARNAAGVFSEPSESTGAITARDEVEPPQIRMDPKYKDTIVVHAGELFKIDADIHGKPIPTTQWIKGDHELSNTARLEIKSTDFATSLSVKDAIRIDSGSYILKAKNVAGEKSVTVNVKVLDRPGPPEGPIVISGVTAEKCTLAWKPPLQDGGSDIINYIVERRETSRLVWTVVDANVQTLGCKVTKLLEGNEYIFRVMAVNKYGVGEPLESEPVTAKNPFVVPDAPKAPEITAVTKDSMIVVWERPAFDGGSEILGYVLEKRDKEGIRWTRCHKRLIGELRLRVTGLLENHNYEFRVSAENAAGLSEPSPPSAYQKACDPIYKPGPPNNPRVTDITRSSVFLSWGKPIYDGGCEIQGYIVEKCDTSVGEWTMCTPPTGINKTNIEVEKLLEKHEYNFRICAVNKAGVGEHADVPGPVIVEEKLEAPDIDLDLELRKILNIRAGGSLRLFVPIRGRPTPEVKWGKVDGEIRDAAIIDSTSSFTSLVLDNVNRYDSGKYTLTLENSSGTKSAFVTVRVLDTPSPPVNLKVTEITKDSVSITWEPPLLDGGSKIKNYIVEKREATRKSYAAVVTNCHKNSWKIDQLQEGCSYYFRVTAENEYGIGLPAHTDDPVKVAEVPQPPGKITVDDVTRNSVSLSWTKPEHDGGSKIIQYIVEMQAKHSEKWSECARVKSLEAVITNLTQGEEYLFRVVAVNEKGRSDPRSLAVPIVAKDLVIEPDVRPAFNSYSVQVGQDLKIEVPISGRPKPTITWTKDDLPLKQTTRINVTDSLDLTVLSIKETHKDDGGHYGITVANVVGQKTASIEIITLDKPDPPKGPVKFDEVSAESITLSWEPPLYTGGCQITNYVVQKRDTTTTVWEVVSATVARTTLKVTKLKTGTEYQFRIFAENRYGQSFALESEPIVAQYPYKEPGPPGTPFVTAVSKDSMVVQWHEPINNGGSPVIGYHLEKKERNSILWTKVNKTIIHDTQFKAVNLEEGIEYEFRVYAENIVGIGKASKNSECYVARDPCDPPGTPEAIIVKRHEITLQWTKPAYDGGSVITGYIVEKRDLPEGRWMKASFTNVIETQFTVSGLTEDQRYEFRVIAKNAAGAVSKPSDSTGPITARDEVELPRISMDPKFRDTIVVNAGETFRLEADVHGKPLPTIEWLRGDKEIEESARYEIKNTDFKALLIVKDAIRIDGGQYILRASNVAGSKSFPVNVKVLDRPGPPEGPVQVTGVTAEKCTLTWSPPLQDGGSDISHYVVEKRETSRLAWTVVASEVVTNSLKVTKLLEGNEYIFRIMAVNKYGAGEPLESAPVLMKNPFVLPGPPKSLEVTNIAKDSMTVCWNRPDSDGGSEIIGYIVEKRDRSGIRWIKCNKRRITDLRLRVTGLTEDHEYEFRVSAENAAGVGEPSPATLYYKACDPVFKPGPPINAHVVDTTKNSITLAWGKPIYDGGSEILGYVVEICKADEEEWQIVTPQTGLKATRFEISKLTEHQEYKVRVCALNKVGLGEATAVPGTVKPEDKLEAPELDLDSELRKGIVVRAGGSVRIHIPFKGRPTPEITWSREEGEFTDKVQIEKAANYTQLSIDNCDRNDAGKYVLKLENSSGSKSAFVTVKVLDTPGPPQNLAVKEVRKDSVLLVWDPPLIDGGAKVKNYVIDKRESTRKAYANVSNKCSKTSLKVENLTEGAIYYFRVMAENEFGIGVPVETVDAVKASEPPSPPGKVTLTDVSQTSASLMWEKPEHDGGSRILGYVVEMQPKGTEKWSVVAESKVCSAVVTGLSSGQEYHFRVKAYNEKGQSDPRVLGVPVIAKDLTIQPSFKLPFNTYSVQAGEDLKIEIPVIGRPRPEISWVKDGEPLKQTTRVNVEKTATSTILHIKESNKDDFGKYTVTATNSAGTATENLSIIILEKPGPPVGPVRFDEVSADFVVISWEPPAYTGGCQISNYIVEKRDTTTTTWHMVSATVARTTIKITKLKMGSEYQFRIFAENRYGKSAPLDSKPVIVQYPFKEPGPPGTPFVTSVSKDQMLVQWHEPVNDGGSKVIGYHLEQKEKNSILWVKLNKTPIQDTKFKTTGLDEGLEYEFRVSAENIVGIGKASKVSECFVARDPCDPPGRPEAIVITRNNVTLKWKKPAYDGGSKITGYIVEKKDLPDGRWMKASFTNVLDTEFTVSGLVEDQRYEFRVIARNAAGNFSEPSESTGAITARDEIDAPNASLDPKYKDVIVVHAGETFVLEADIRGKPIPDIVWSKDGRELEETAARMEIKSTIQRTTLVVKDCIRSDGGQYILKLSNVGGTKTIPITVKVLDRPGPPEGPLKVSGVTAEKCYLAWNPPLQDGGASISHYIIEKRETSRLSWTQVSTEVQALNYKVTKLLPGNEYIFRVMAVNKYGTGDPLESEPVIARNPYKPPGPPSPPEVSAITKDSMVVTWARPVDDGGAEIEGYILEKRDKEGVRWTKCNKKTLTDLRFRVTGLTEGHSYEFRVAAENAAGVGEPSEPSVFSRACDALYPPGPPSNPKVTDTSRSSVSLAWNKPIYDGGAPVKGYVVEVKEATADEWTTCTPPTGLQGKQFTVTELKENTEYNFRICAINSEGVGEPATIPGSVAAKERQEPPEIELDADLRKVVILRASATLRLFVTIKGRPEPEVKWEKAEGVLTDRAQIEVTSSYTMLVIDNVTRFDSGRYNLTLENNSGSKTAFVNVRVLDSPSAPVNLTVREVKKDSVILAWEPPLIDGGAKITNYIVEKRETTRKAYATVTNNCTKNSFKIENLQEGCSYYFRVLASNEYGIGLPAETTEPVKASEPPLPPGRVTLVDVTRNTATIKWEKPESDGGSKITGYVVEMQTKGSEKWSICTQVKTLEATISGLTAGEEYIFRVAAINEKGKSDPRQLGVPVIARDIEIKPSVELPFNTFNVKARDQLKIDIPFKGRPQATVSWKKDGQTLKETTRVNVSSSKTVTSLIIKEASREDVGTYELCVSNSAGSVTVPITVIVLDKPGPPGPIHIDEVSCDNITISWNPPEYDGGCQISNYIVEKRETTSTTWHVVSQAVARTSIKIVRLVTGSEYQFRVCAENRFGKSSYSESSAVVAEYPFSPPGPPGTPKVVHATKSTMLVTWQVPVNDGGSRVLGYHLEYKERSSILWSKANKTLIADTQMKVSGLDEGLMYEYHVYAENIAGIGKCSKSCEPVPARDPCDPPGQPEVTNITRKSVSLKWSKPHYDGGAKITGYIIERRELPDGRWLKCNFTNVPETYFEVTELTEDQRYEFRVFARNAADSISEPSESTGPITVKDDVEAPRIMMDVKFRDVIVVKAGEVLKINADVAGRPLPIISWAKDGVEIEERARTEIVSTDYTTLLTVKDCVRRDSGQYVLTVKNVAGTRSMAVNCKVLDKPGPPAGPLEITGLTAEKCSLSWGPPQEDGGAAIDYYIVEKRETSRLAWTICEGELRTTFCKVTKLLKGNEYIFRVTGVNKYGVGEPLESMAVKALDPFTVPSPPTSLEITSVTKEFMTLCWSRPESDGGSEISGYIVERREKNSLRWVRVNKKPVYDLRVKSTGLREGCEYEYRVYAENAAGLSLPSESSPLIRAEDPVFLPSPPSKPNVMDSGKTNITIGWVKPLFDGGAPITGYTVEFKKSDETDWQTAIQNLRGTEYTVSGLTTGAEYVFRVRSINKVGASDPSDSSDPQIAKEREEEPVFDLDTEMRKTLIVKAGASFTMTVPFRGRPVPSVSWSKPDTDLRTRAYIDSTESRTSLTIENANRNDSGKYTLMIQNVLNAASLTLVVKVLDSPGPPANITVHDVTKESAVLSWDVPENDGGAPVKNYHIEKREASKKAWVSVTNNCNRLSYKITNLQEGAIYYFRVSGENEFGVGVPAETKEGVKITEKPSPPEKLGVTSVSRDSVSLAWLKPEHDGGSRIVHYVIEALEKGQTTWMRCAVVKSTHHVVSGLRQNSEYFFRVFAENQAGLSDPRELLLPVLIKEQLEPPEIDMKNFPSHTVYVRAGSNLKVDIPISGKPLPKVTLSRDGVPLKATMRFNTEITAENLTINLKESVAADAGRYEITAANSSGTTKAFINIVVLDRPGPPTGPVVISDITEDSVTLKWEPPKYDGGSQVTNYIVLKRETSTAVWTEVSATVARTMIKVMKLTTGEEYQFRIKAENRFGISDHIDSACVVVKLPYTTPGPPSTPWVTNVTRESITVGWHEPVSNGGSPVTGYHLEMKDRNSILWQKANKMVIRTTHFKVTTISAGLIYEFRVYAENAAGIGKPSHPSEPVLAIDACEPPRNVRITDISKNSVNLSWQQPAFDGGSKITGYMVERRDLPDGRWAKASFTNVTETHFTVSGLTQNAQYEFRVFARNAVGSISNPSEVVGPITCIDSYGGPVIDLPLEYTEVVKYRAGTSVKLRAGISGKPEPTIEWYKDDKELQTNALVCVENTTDLASILIKDATRLNSGTYELKLRNALGSASATIRLQILDKPGPPGGPIEFKTVTAEKITLLWQPPADDGGAKITHYIVEKRETSRVVWSMVSENLEECIIKTTKIIKGNEYIFRVRAVNKYGIGDALESHPVIARNAFVTPGPPSVPEVTKINKNSMTVVWSRPVADGGSDISGYILEKRDKKSLGWFKVLKETIRDTRQKVTGLTEHSDYQYRVCAVNAAGQGPFSEPSDFYKAADPIDPPGPPAKIRIADSTKSSITLGWSKPVYDGGSAVTGYVVAMRQGEEEEWTVVSTKGEVRTTEYVVSNLSPGVNYYFQVSAVNCAGQGEPIAMTEPVQAKDILEEPEIDLDVAFRTSIIAKAGEDVHALVPFKGRPPPTVTWRKDEKNLGSDARYSIQNTDSSSILTIPQVTRHDTGKYILTIENGVGQPKSSTVSVKVLDTPAACQNLQVKHVSQGTVTLFWDPPLIDGGSPIINYIIEKKDATKRTWSSVSHKCSSTSFKVTDLSEKTPFFFRVFAVNEIGIGEPCETTEPVKAAEVPAPIRDLSVKDSTKTSVTLSWTKPDFDGGSVITDYIVERKGKGEQTWSHAGISKTCEIEVGKLKELSELEFRVSARNEKGLSDSVSIGPVTVKELVIPPEVDLSEIPGAQVAVRIGHNVHLELPYKGKPKPSISWLKDGLPLKESELVRLGKTENKLTLSIKNAKKENGGKYTIILDNAVCRNTYPITVITLGPPSKPKGPIRFDEIKADSVIMSWDVPDDDGGGEITCYSIEKREASQTNWKMVCSSVARTTFKVPNLVKDAEYQFRVRAENRYGVSQPLVSNIILAKHQFRIPGPPGKPVTYNVTSDGMSLTWDAPVYDGGSEVTGYHVEKKERNSILWQRINMSPISGREYRATGLMEGLDYQFRVFAENSAGLSSPSDPSKFTLAVSPVDPPGTPDYIDVTRETITLKWNPPLRDGGSKIVAYSIEKRQGSDRWTRCNFTDVSECQYTVTGLSPGDRYEFRIIARNAVGTISPPSQSSGVIMTRDENVAPTVEFGPEYFDGITIKSGESLRIKALVQGRPVPRVTWFKDGVEIEKKMNMEITDVLGSTSLFVRDATRDHRGVYRVEAKNASGSTKAEITVRVQDTPGKPVGPIRFTNITGEKMTLWWDAPHNDGCAPVSHYLIEKRETSRLAWALIEDNCEALSYTATKLITGNEYQFRISAVNKFGVSRPLDSDPVVAQIQYTIPDAPGTPEPSNVTGNSITLTWARPESDGGSEIQQYILERREKKSTRWVKVISKRPICETRFKVTGLTEGNEYEFHVMAENAAGVGPASGVSRLIKCREPVNPPGAPTVVKVTDTSKTTVSLEWSKPVFDGGLEIIGYIIEMCKADLGDWHKVNVEACVKTRYTVTDLQAGEEYKFRVSAINAAGKGDSCEVTGTIKAVDRLSAPELDIDANFKQTHVVRAGASIRLFIAYQGRPTPTAVWSKPDSNLSIRADIHTTDSFSTLTVENCNRTDAGKYTLTVENNSGSKSITFTVKVLDSPGPPGPITFKDVTRGSATLMWDAPLLDGGARIHHYVVEKREASRRSWQVVSEKCIRQILRVSDLLEGVPYYFRVSAENEYGVGEPYEMPEPMVATEQPAPPRRLDIVDTSKSSVVLAWLKPDHDGGSRITGYLLEMRQKGSDFWVEAGHTKQMTFTVERLVENTEYEFRVKAKNDAGYSEPREAFSSVIIKEPQIEPTADLTGITNQLITCKAGSTFTIDVPISGRPAPKVTWKLEEMRLKETDRVSITTTKDRTTLSVKDSMRGDSGRYFLTLENTAGVKTFTITVVVIGRPGPVTGPIEVSSISAESCVLSWAEPQDNGGTDITNYIVEKRESGTTAWQLVNSSVKRTQIKVTHLTKYMEYSFRVSSENRFGVSKPVESAPIVAEHPFVPPSAPTRPEVYYVSANAMSIRWEEPYHDGGSKVIGYWVEKKERNTILWVKENKVPCLECNYKVTGLVEGLEYQFRTYALNAAGVSKASEASRPVMAQNPVDAPGRPEVTDVTRSTVSLIWSAPVYDGGSKVVGYIIERKPVSEVGDGRWLKCNYTIVSDNFFTVTALSEGDTYEFRVLAKNAAGVISKGSESTGPITCRDEYAPPKAELDARLQGDLVTIRAGSDLVLDAAVGGKPEPKIIWTKGDKELDMCEKISLQYTGKRATAVIKFCDRSDSGKYTLTVKNASGTKAVSVLVKVLDSPGPCGKLTVSRVTEEKCTLAWSLPQEDGGAEITHYIVERRETSRLNWVIVEGECPTLSHVVTRLIKNNEYIFRVRAVNKYGPGVPVESEPIVARNSFTIPSQPGIPEEVGAGKEHIIIQWTKPESDGGNDISNYLVDKREKKSLRWTRVNKDHVVYDTRLKVTGLMEGCDYQFRVTAVNAAGNSEPSEASNFISCREPSYTPGPPSAPRVVDTTKHSISLAWTKPMYDGGTDIIGYVLEMQEKDTDQWYRVHTNATIRNNEFTVTDLKMGQKYSFRVAAVNVKGMSEYSESTAEIEPVERLEIPDLELADDLKKTVTIRAGASLRLMVSVSGRPPPVITWSKKGIDLASRAIIDTTESYSLLIVDKVNRYDAGKYTIEAENQSGKKSATVLVKVYDTPGPCPSVKVKEVSRDSVTITWEVPTIDGGAPVNNYIIEKREAAMRAFKTVTTKCSKTLYRISGLIEGAMYYFRVLPENIYGIGEPCETSDAVLVSEVPLVPTKLEVVDVTKSTVTLAWEKPLYDGGSRLTGYVLEACRAGTERWMKVVTLKPTVLEHTVISLNEGEQYLFRVRAQNEKGVSEPREIVTAVTVQDLRVLPTIDLSTMPQKTIHVPAGRPVELVIPIAGRPPPAASWFFAGSKLRESERVTVETHTKVAKLTIRETTIKDTGDYVLELKNVTGTTSETIKVIVLVDKPGPPSGPIKVDEIDATSVTISWGPPELDGGAPLSGYVVEQRDAHRPGWLPVSESVTRSTFKFTRLIEGNEYVFRVAATNRFGIGSYLQSEVIECRSSINIPGPPETLQIFDVSREGMTLTWYPPEDDGGSQVTGYIVERKEVRADRWVRVNKVPVTMTRYRSTGLIEGLEYEHRVTAVNVRGTGKPSRPSKPTVAMDPIAPPGKPQNPRVTDTTRTSVSLAWSVPEDEGGSKVTGYLIEMQKVDQHEWTKCNTTPTKIREYTLTHLPQGAEYRFRVLACNAGGPGEPAEVPGTVKVTEMLEYPDYELDERYQEGILVRQGGVIRLTIPIKGKPFPICKWTKEGQDISKRAMIATSETHTELVIKEADRDDSGTYDLILENKCGKKAVYIKVRVIGNPNTPEGPLEYDDIQARSVRVSWRPPADDGGADILGYILERREVPKSAWYTIDSRVRGTSLVVKGLKENVEYHFRVSAENQFGISKPLKSEEPVIPKTPLNPPEPPSNPPEILDVTKSSVSLSWSRPKDDGGSRVTGYYIERKETSTDKWVRHNKTQITTTMYTVTGLVPDAEYQFRIIAQNDVGLSETSPASEPVVCKDPFDKPSQPGELEILSISKDSVTLQWEKPECDGGKEILGYWVEYRQSGDSAWKKSSKDRIKDRQFTIGGLLEATEYEFRVFAENETGLSRPRRTAMSVKTKLTSGEAPGVRKEMKDVTTKLGEAAQLSCQIVGRPLPDIKWFRFGKELVQSRKYKMSSDGRTHTLTVMTEEQEDEGVYTCVATNEVGEVESSSKLLLQATPQFHPGYPLKEKYYGAVGSTLRIHVMYIGRPVPAITWFRGQKLLQNSENITIENTEHYTHLVMKNVQRKTHAGKYKVQLSNVLGTVDTMLDVEIQDKPDKPTGPIVIEALLKNSVVISWKPPADDGGSWITNYVVEKCEAKEGAEWQLVSSAISVTTCRIVNLTENAGYYFRVSAQNMFGISEPLEVSSVVIIKSPFEKPGAPGKPTITAVTKDSCVVAWKPPASDGGAKIRNYYLEKREKKQNKWIAVTTDEIRETVFSVQNLIEGLEYEFRVKCENLGGESEWSEISEPVTPKSDVPIQAPHFKEELRNLNVRYQSNATLVCKVTGHPKPIVKWYRQGKEIIADGLKYRIQEFKGGYHQLIIASVTDDDATVYQVRATNQGGSVSGTASLEVEDTVPAKIHLPKNLEGMGAVHALRGEVISIKIPFSGKPDPVITWQKGQDLIDNNGHYQVIVTRSFTSLVFPNGVERKDAGFYVVCAKNRFGIDQKTVELDVADVPDPPRGVKVSDVSRDSVNLTWTEPASDGGSKVTNYIVEKCATTAERWIRVGQARETRYTVINLFGKTSYQFRIIAENKFGLSKPSEPSEPTVTKEDKTRAMNYDEEVDETREVSMTKASHSSTKELYEKYMIAEDLGRGQFGIVHRCVETSSKKTYMAKFVKVKGTDQVLVKKEISILNIARHRNMLYLHESFESMEELVMIFEFISGLDIFERINTSAFELNEREIVSYVRQVCEALEFLHSHNIGHFDIRPDNIIYQTRRSSTIKIIEFGQARQLKPGDNFRLQFTAPEYYAPEVHQHDVVSTATDMWSLGTLVYVLLSGINPFLAETNQQIIENIMNAEYTFDEEAFQEISLEAMDFVDRLLVKERKSRMTASEALQHPWLKQKTERVSTKVIRTLKHRRYYHTLVKKDLNMVVSAARISCGGAIRSQKGVSIAKVKVASIEIGPVSGQIMHAVGEEGGYVKYVCRIENYDQSTQVTWYFGVRQLENSEKYEITYEDGVATMYVKDITKFDDGTYRCKVVNDYGEDSSYAELFVKGVREVYDYYCRRTVKKLKRRTDAMRLLERPPEFTLPLYNKTAYVGENVRFGVTITVHPEPRVTWYKSGQKIKPGDDDRKYIFESDKGLYQLTINSVTMDDDAEYTVVARNKYGEDSCKAKLTVTPHPPPSDTTLRPMFKRLLANAECQEGQSVCFEIRVSGIPPPTLKWEKDGRPLSLGPNIEIIHEGLDYYALHIRDTLPEDTGYYRVTATNTAGSSSCQAHLQVERLRYVKQEFKTKEEHERHVQRQIDKTLRMAEILSGTEAVPLTQVAQEALREAAILYKPAVSTKTVKGEYRLETEEKKEERKLRMPYEVPEPRKYKQTTIEEDQHIKQFVPMSDMKWYKKIRDQFEMPGKIDRVVQKRPKRIRLSRWEQFYVMPLPRITDQYRPKWRIPKLSQDDLEMVRPARRRTPSPDYYYYYRPRRRSLGDISDEELLLPIDDYLAMKRTEEERLRLEEELELGFSASPPSRSPPRFELSSLRYSSPQAHVKVEEARRDFRYSTYHIPTKEETSTSYAELRERHARASHRQAHQRQRIMAEREDHELLRPATTTQRLLEYKSELDHLAKEAKSRKKSRRQREVTEITEIEEEYEISKHAQRETSSSVSRLLRRRRSLSPTYIELMRPVSELIRPRPRPAEEYEDEEEEEEEDVERRSPTPERTRPRSPSPVSSERSLSRFERSARFDIFSRYESMKAALKTQKTSERKYEVLSQQPFTLDHAPRITLRMRSHRVPCGQNTRFILNVQSKPTAEVKWYHNGVELQESSKIHYTNTSGVLTLEILDCHIDDSGTYRAVCTNYKGEASDYATLDVTGGDYTTYASQRRDEQVPRSVFPELTRTEAYAVSSFKKTSEMEASSSVREMKSLMTETRESLSSYEHHASAEMKSAAIEEKSLEEKSTHRKIKTTLAARILTKPRSITVYEGESARFSCDTDGEPVPTVTWLRGGQVISTSARHQVTTSKYKSTFEISSVQASDEGNYSVVVENSDGRQEAQFTLTVQKARVTEKAVTSPPRVKSPEPRVKSPEGAKSPKRVKSPEPVTPHPKAVPPTETKPTPTEKVQQKPVAAPPKIIQSLKAEASKDIAKLTCVVESSALCAKEVTWYKDGRRLKENGHFQFHYSADGTYELKILNLAESDRGEYVCEVSGEGGTSKTNFQFVGQAFKSIHEQVSSISETNKKAAPKTAEPTETKKTEPKAPAPISTKPVIVTGLQDTTVSSDSVAKFAVKVTGEPQPTVIWTKDGKAISQGGKYKLSEDKGAFFLEIHKTDTSDSGLYTCTITNSAGSVSSSCKLTIKVVEDTEIQKVSAQKTSEITSQKKASVQEEISKKALISEEIKTSEVKSHEKLALKEEASTVLISEKVKKSEAASLEKSVVHEEITKTSQASEEIRTHAEIKAFSTQMSITAGQKVTLKANIAGATDVKWVLNGVELSNSDEYRYGISGSDQTLTIRQAGHKDEGILTCIGKTSQGIIKCQYDLTLSKELSDAPAFISQPRSQNVNEGQNVLFSCEISGEPSPEIEWFKNNLPISISSNISVSRSRNVYSLEIRNASVSDSGKYTIKAKNFHGQCSATASLTVLPLVEEPPREVVLRTSGDTSLQGSFSSQSVQMSASKQEASFSSFSSSSASSMTEMKFASMSAQSMSSMQESFVEMSSSSFMGKSSMTQLESSTSRMLKAGLRGIPPKIEALPSDISIDEGKVLTVACAFTGEPTPEITWSRGGRTIHDQEQRGRFMENTDDL

SEQ ID NO: 47 - protein, 265 aa, Gallus gallus
MSEAEEEYEEEQPEEEEEAAAAAEEEEEEEAEASKPHEEPEEERPRPRPVVPQLAPPKIPEGERVDFDDIHRKRMEKDLLELQTLIDAHFEQRRREENELVALMERIERRRAERNEQLRSRTEKERERQARLAEEKLRKEEEEAKKRAEDDAKKKKVLSNMPHFGGYLAKAEQRRGKRQTGREMKLRILAERKKPLHIEHMREDELRAKAKELHDWIQQLESEKFDLMEKLRRQKYEINVLYNRISHAQKFKKVVGKGRVGGRWK

SEQ ID NO: 48 - protein, 235 aa, Gallus gallus
AAEASKPHEEPEEERPRPRPVVPQLAPKIPEGERVDFDDIHRKRMEKDLLELQTLIDAHFEQRRREENELVALMERIERRRAERNEQLRSRTEKERERQARLAEEKLRKEEEEAKKRAEDDAKKKKVLSNMPHFGGYLAKAEQRRGKRQTGREMKLRILAERKKPLHIEHMREDELRAKAKELHDWIQQLESEKFDLMEKLRRQKYEINVLYNRISHAQKFKKVVGKGRVGGRWK

SEQ ID NO: 49 - protein, 188 aa, Gallus gallus
MPEPRERKSKITASRKLLLKSLMLAKAKEEWEQEIVDKQSEKERYLSERITPLHTSGLSLSQLQDLCRELHEKVEIVDEERYDIEAKCNHNTREIKDLKLKVLDLRGKFKRPPLRRVRVSADAMLRALLGSKHKVSMDLRANLKSVKKEDTEKERPVEVGDWRKNVEAMSGMEGRKKMFDAAKSPTGQ

SEQ ID NO: 50 - protein, 166 aa, Gallus gallus
MLAKAKEEWEQEIVDKQSEKERYLSERITPLHTSGLSLSQLQDLCRELHEKVEIVDEERYDIEAKCNHNTREIKDLKLKVLDLRGKFKRPPLRRVRVSADAMLRALLGSKHKVSMDLRANLKSVKKEDTEKERPVEVGDWRKNVEAMSGMEGRKKMFDAAKSPTGQ

SEQ ID NO: 51 - protein, 223 aa, Salmo salar
MSDTEEVEAQKPQFKVPKIPDGDKVDFDDIQKKRQNKDLIELQALIDAHFEHRKKEEEELIALKERIEKRRAERAEQNRIRSEKEKERAARREEERLKREEADAKKKADEDAKKKSALSSMGSNYSSHLQKADSKRGGKKETEREKKKKILAGRRKALNIDHLNEEKLKEKAKELHEWMQTLESEKFDHIERLKRQKYEVTTLRKRVEELSKFSKKGKTVRRK

SEQ ID NO: 52 - protein, 287 aa, Gallus gallus
MSDTEEVEHGEAHEAEEVHEEAHHEEAHHEEAHHEEAHHAEAHHAEAHHEEAHAHAEEVHEPAPPPEEKPRIKLTAPKIPEGEKVDFDDIQKKRQNKDLIELQALIDSHFEARRKEEEELVALKERIEKRRAERAEQQRIRAEKEKERQARLAEEKARREEEDAKRKAEDDLKKKKALSSMGASYSSYLAKADQKRGKKQTARETKKKVLAERRKPLNIDHLNEDKLRDKAKELWDWLYQLQTEKYDFAEQIKRKKYEILTLRCRLQELSKFSKKAGAKGKVGGRWK

SEQ ID NO: 53 - protein, 603 aa, Sus scrofa
MASAPTSKYNSHSLENESIKRTSRDGVNRDMGEAVPRLPGETPITDKEVIYICPFNGPIKGRVYITNYRLYLRSLETDSALILDVPLGVISRIEKMGGATSRGENSYGLDITCKDMRNLRFALKQEGHSRRDMFEILTRYAFPLAHSLPMFAFLNEEKFNVDGWTVYNPVEEYRRQGLPNHHWRITFINKCYELCDTYPALLVVPYRAADEDLRRVATFRSRNRIPVLSWIHPENKTVIVRCSQPLVGMSGKRNKDDEKYLDVIRETNRQVNKLTIYDARPNVNAVANKATGGGYESDDAYHNAELFFLDIHNIHVMRESLKKVKDIVYPNVEESHWLSSLESTHWLEHIKLVLTGAIQVADRVSSGKSSVVVHCSDGWDRTAQLTSLAMLMLDSFYRSIEGFEILVQKEWISFGHKFASRIGHGDKNHADADRSPIFLQFIDCVWQMSKQFPTAFEFNEHFLITILDHLYSCRFGTFLYNCESARERQKVTERTVSLWSLINSNKDKFKNPFYTKEINRVLYPVASMRHLELWVNYYIRWNPRIKQQQPNPVEQRYMELLALRDEYIKRLEELQLANSAKLSEPAAAPSSPSQMVSHVQTHF

SEQ ID NO: 54 - protein, 298 aa, Sus scrofa
MPLSGTPAPNKKRKSSKLIMELTGGGQESSGLNLGKKISVPRDVMLEELSLLTNRGSKMFKLRQMRVEKFIYENHPDVFSDSSMDHFQKFLPTVGGQLGTAGQGFSYSKGSSGGQAGGSSSAGQYGSGQQHHHQGSGSGSGGAGGPGSQTGRGGDAGTTGVGETGTGDQAGGEGKHITVFKTYISPWEKAMGVDPHQKVELGIDLLAYGAKAELPQYKSFNRTAMPYGGYEKASKRMTFQMPKFDLGPLLSEPLVLYNQNLSNRPSFNRTPIPWLSSGEPVDYNVDIGIPLDGETEEL

SEQ ID NO: 55 - protein, 284 aa, Gallus gallus
MEAIKKKMQMLKLDKENAIDRAEQAEADKKQAEDRCKQLEEEQQGLQKKLKGTEDEVEKYSESVKEAQEKLEQAEKKATDAEAEVASLNRRIQLVEEELDRAQERLATALQKLEEAEKAADESERGMKVIENRAMKDEEKMELQEMQLKEAKHIAEEADRKYEEVARKLVVLEGELERSEERAEVAESKCGDLEEELKIVTNNLKSLEAQADKYSTKEDKYEEEIKLLGEKLKEAETRAEFAERSVAKLEKTIDDLEDEVYAQKMKYKAISEELDNALNDITSL

SEQ ID NO: 56 - protein, 434 aa, Bos taurus
MAMQKIFAREILDSRGNPTVEVDLHTAKGRFRAAVPSGASTGIYEALELRDGDKSRYLGKGVLKAVEHINKTLGPALLEKKLSVVDQEKVDKFMIELDGTENKSKFGANAILGVSLAVCKAGAAEKGVPLYRHIADLAGNPELILPVPAFNVINGGSHAGNKLAMQEFMILPVGASSFREAMRIGAEVYHHLKGVIKAKYGKDATNVGDEGGFAPNILENNEALELLKTAIQAAGYPDKVVIGMDVAASEFYRNGKYDLDFKSPDDPARHISGEKLGELYKNFIKNYPVVSIEDPFDQDDWATWTSFLSGVNIQIVGDDLTVTNPKRIAQAVEKKACNCLLLKVNQIGSVTESIQACKLAQSNGWGVMVSHRSGETEDTFIADLVVGLCTGQIKTGAPCRSERLAKYNQLMRIEEALGDKAVFAGRKFRNPKAK

SEQ ID NO: 57 - protein, 603 aa, Bos taurus
MASAPTSKYNSHSLENESIKRTSRDGVNRDVGETLPRLPGEIRITDKEVIYICPFNGPIKGRVYITNYRLYLRSLETDSALILDVPLGVISRIEKMGGATSRGENSYGLDITCKDLRNLRFALKQEGHSRRDMFEILTRYAFPLAHSLPIFAFLNEEKFNVDGWTVYNPVEEYRRQGLPNHHWRITFINKCYKLCDTYPALLVVPYRASDEDLRRVATFRSRNRIPVLSWIHPENKTVIVRCSQPLVGMSGKRNKEDERYLDVIRETNRQVNKLTIYDARPNVNAVANKATGGGYESDDVYHNAELFFLDIHNIHVMRESLKKVKDIVYPNVEESHWLSSLESTHWLEHIKLVLTGAIQVADRVSSGKSSVVVHCSDGWDRTAQLTSLAMLMLDSFYRSIEGFEILVQKEWISFGHKFASRIGHGDKNHADADRSPIFLQFIDCVWQMSKQFPTAFEFNERFLITILDHLYSCRFGTFLYNCESAREKQKVTERTVSLWSLINSNKDKFKNPFYTKEINRVLYPVASMRHLELWVNYYIRWNPRIKQQQPNPVEQRYMELLALRDEYIKRLDELQLANSAKLSDPSASPSSPSQMMPHVQTHF

SEQ ID NO: 58 - protein, 224 aa, Bos taurus
MELYETSPYFYQEPHFYDGENYLPVHLQGFEPPGYERAELSLSPEARVPLEDKGLGPAEHCPGQCLPWACKVCKRKSVSVDRRRAATLREKRRLKKVNEAFEALKRSTLLNPNQRLPKVEILRSAIQYIERLQALLSSLNQEERDLRYRGGGGPQAAVPSECSSHSASCSPQWGSALEFGPNPGDHLLPADPTDAHNLHSLTSIVDSITVEDVAAAFPDETIPN

SEQ ID NO: 59 - protein, 224 aa, Sus scrofa
MELYETSPYFYQEPHFYDGENYLPVHLQGFEPPGYERTELSLSPEARVPLEDKGLGTPEHCPGQCLPWACKVCKRKSVSVDRRRAATLREKRRLKKVNEAFEALKRSTLLNPNQRLPKVEILRSAIQYIERLQALLSSLNQEERDLRYRGGGGPQPGVPSECSSHSASCSPEWGSALEFGPNPGDHLLTADPTDAHNLHSLTSIVDSITVEDVAVAFPDETMPN

SEQ ID NO: 60 - protein, 2058 aa, Gallus gallus
MGGSGAAATLALGLALGLALGGWANCPERELQRREEEANVVLTGTVEEIMNVDPVHHTYSCKVRVWRYLKGKDIVTHEILLDGGNKVVIGGFGDPLICDNQVSTGDTRIFFVNPAPQYMWPAHRNELMLNSSLMRITLRNLEEVEHCVEEHRKLLADKPNSYFTQTPPTPRDACRGMLCGFGAVCERSPTDPSQASCVCKKTACPVVVAPVCGSDYSTYSNECELEKAQCNQQRRIKVISKGPCGSKDPCAEVTCSFGSTCVRSADGQTAGCVCPASCSGVAESIVCGSDGKDYRSECDLNKHACDKQENVFKKFDGACDPCKGILNDMNRVCRVNPRTRRVELLSRPENCPSKREPVCGDDGVTYASECVMGRTGAIRGLEIQKVRSGQCQHQDKCKDECKFNAVCLKRWHARCSCDRITCDGTYRPVCARDSRTYSNDCERQKAECHQKAAIPVKHSGPCDLGTPSPCLSVECTFGATCVVKNREPVCECQQVCQGRYDPVCGSDNRTYGNPCELNAMACVLKREIRVKHKGPCDRCGKCQFGAICEAETGRCVCPTECVPSSQPVCGTDGNTYGSECELHVRACTQQKNILVAAQGDCKSCGTTVCSFGSTCVGGQCVCPRCEQQPLAQVCGTDGLTYDNRCELRAASCQQQKSIEVAKMGPCEDECGSGGSGSGDGSECEQDRCRHYGGWWDEDAEDDRCVCDFTCLAVPRSPVCGSDDVTYANECELKKTRCEKRQNLYVTSQGACRALTTTPPPLPVVHCSQTIYGCCPDNMTLALGVGAAGCPSTCQCNPYGSYGGTCDPATGQCSCKPGVGGLKCDRCEPGFWNFRGIVTDSKSGCTPCNCDPVGSVRDDCEQMTGLCSCKTGITGMKCNQCPNGSKMGMAGCEKDPSAPKSCEEMSCEFGATCVEVNGFAHCECPSPLCSEANMTKVCGSDGVTYGDQCQLKTIACRQGQLITVKHVGQCHESITHTSHTMPPTPLPTLPLDKLIVPPPLQLTTQAPEPTELATTSLLMEASPTTRSHPTTRRVTTTRPVTTPWMTHGVLKTTVRPLSTSPVVLATTQPPYAESGSAEGSGDQEMSISGDQESSGAGSAGEEEVEESQVTPTPAIERATCYNTPLGCCSDGKTAAADAEGSNCPATKVFQGVLILEEVEGQELFYTPEMADPKSELFGETARSIESALDELFRNSDVKNDFKSIRVRDLGQSSAVRVIVESHFDPATSYTAADVQAASLKQIRASKKRTILVKKPQQEHVKFMDFDWIPRIFTTTITTTTATTMAPATTRRHTTASAATTAHILRQDTVGHPSAKLAAPASTRRPTSTLPTTARRKPTRQPPSTTKKPSRPCDSHPCLHGGTCEDDGREFTCRCPAGKGGAVCEKPIRYFIPSFGGKSYLAFKMMKAYHTVRIAMEFRATELSGLLLYNGQNRGKDFISLALVGGFVELRFNTGSGTGVITSKVRVEPGKWHQLVVNRNRRSGMLAVDGEHVSGESPTGTDGLNLDTDLFVGGAPEDQMAVVAERTAATVGLKGSIRLLDVNNQMYDLREKGSDVLYGSGVGECGNDPCHPNPCHHGASCHVKEAEMFHCECLHSYTGPTCADERNPCDPTPCHISATCLVLPEGGAMCACPMGREGEFCERVTEQDHTMPFLPEFNGFSYLELNGLQTLFLTCRQMSMEVVFLAKSPSGMIFYNGQKTDGKGDFVSLALHDGYLEYRYDLGKGAAVLRSKEPVPLNTWISVLLERSGRKGVMRINNGERVMGESPVPHAFLNLKEPFYVGGAPDFSKLARAAAISTSFYGAVQRISIKGVPLLKEQHIRSAVEISTFRAHPCTQKPNPCQNGGTCSPRLESYECACQRGFSGAHCEKVIIEKAAGDAEAIAFDGRTYMEYHNAVTKSEKALQSNHFELSIKTEATQGLILWSGKGLERSDYIALAIVDGFVQMMYDLGSKPVVLRSTVPINTNHWTHIKAYRVQREGSLQVGNEAPITGSSPLGATQLDTDGALWLGGMERLSVAHKLPKAYSTGFIGCIRDVIVDRQELHLVEDALNNPTILHCSAK

SEQ ID NO: 61 - protein, 166 aa, Gallus gallus
MASGVTVNDEVIKVFNDMKVRKSSTPEEIKKRKKAVLFCLSDDKKQIIVEEAKQILVGDIGDTVEDPYTAFVKLLPLNDCRYALYDATYETKESKKEDLVFIFWAPESAPLKSKMIYASSKDAIKKKFTGIKHEWQVNGLDDIKDRSTLGEKLGGNVVVSLEGKPL

SEQ ID NO: 62 - protein, 416 aa, Gallus gallus
MESYKVMLNGPAPWGFRLQGGKDFSMPLSISRLTPGGKAAQAGVGVGDWVLYIDGESTGTMTHIEAQNRIRACGDRLCLTLSRAQNHLGKPQKDSLPCSEPPKYNFAPSTALNKTARPFGASSPPNPRPGLVTKPVTYVPLAPACTPQHNGQVSVPDPSPGAAMKTEPGLAPRTPAATPGPTSRPPWAVDPSFAERYAPDKTSTVLSKHSQPATPTPMQNRSSIVQAAQQAPESPGRTPLCYKCNKIIRGRYLVALGHYYHPEEFTCCQCRKVLDEGGFFEEKGSIFCPKCYDTRYAPSCAKCKKKITGEVMHALKMTWHVQCFTCAACKTPIRNRAFYMEEGQPYCERDYEKMFGTKCRGCDFKIDAGDRFLEALGFSWHDTCFVCAICQTNLEGKTFYSKKDKPLCKSHAFSHV

SEQ ID NO: 63 - protein, 583 aa, Gallus gallus
MPKPINVRVTTMDAELEFAIQPNTTGKQLFDQVVKTVGLREVWFFGLQYVDSKGYSTWLKLNKKVTQQDVRKENPLQFKFRAKFFPEDVSEELIQEITQRLFFLQVKEAILNDEIYCPPETAVLLASYAVQSKYGDYNKEIHKLGYLANDRLLPQRVLEQHKLTKEQWEERIQNWHEEHRGMLREDSMMEYLKIAQDLEMYGVNYFEIKNKKGTELWLGVDALGLNIYEHDDKLTPKIGFPWSEIRNISFNDKKFVIKPIDKKAPDFVFYAPRLRINKRILALCMGNHELYMRRRKPDTIEVQQMKAQAREEKHQKQLERAQLENEKKKREIAEKEKERIEREKEELMERLRQIEEQTMKAQKELEEQTRRALELDQERKRAKEEAERLEKERRAAEEAKAALAKQAADQMKNQEQLAAELAEFTAKIALLEEAKKKKEEEASEWQHKAFAAQEDLEKTKEELKSVMSAPPPPPPPPVIPPTENEHDEHDENNAEASAELSSDGVMNHRSEEERVTETQKNERVKKQLQALSSELAQARDETKKTQNDVLHAENVKAGRDKYKTLRQIRQGNTKQRIDEFEAM

SEQ ID NO: 64 - protein, 6644 aa, Gallus gallus
MEEEEYEEVVEYYIEETIVEEGEPYEVVTEITDSTSTEFTGPTTITRTIEYEKTSGEGAATPVRKKTIRTKMDTSKFLTPYLQHSNKMKDLFSENKYKEKFNKERGKPYASTIDTPEIRRIKKVQEQLSEVKYRMAGEAARTICHVDEKAWDIEHAKKVSQQVSKVLYKQNWEENKDKYLLPPDAPELVNAIKNTAMFSKKLYTEDWEGDKTLFYPYNDSPELRRVAQAQKALSDIVYKKGHDERKSKYTSLPDPPDVEQAKKVTRQLSDIIYHDDYKNKIKGKWSQTPCYDVVIAKMNAENLSMKKYQEDFENVKDQIYFMQTETPEYEANKRVSDNVSKIKYRADYEKNKAIADYNVLPATENPLLRQLKTAGDVLSDKLYKEAYERSKGTSMNYCETPKFQTDNALKNFSDVKYKDAYQKNILGHYLGSFEDPHQIHCMKVEAMKSDKNYKADYEEEKTKCYFPQTITQEYEAIKKLEQCKDHTYKKHPDQIKFTPVTDSPVQKQAEINSKQLSDKLYRSSGEEVKHKYTLPPDVPQFIQARYNAANVSDAYYKQDYHDLIAKGNNVSLDAIPITRAKASRNIASDYKYKEAYEKAKGQQVGFKSLQDDPKLVHYMHVAKIQSDREYKKDYEKSKTNYHTPPDTFSIQAAKKSQDVASTAHYKNLIHHYTYLPDAMDVELAKNMMQIQSDNVYKQDYNSWFKGIGWSPLGSLDVEKAKKAGDALNEKKYRQHPDTIKFTSVPDSMTMVLAQHNTKQLSDVAYKQEGEKVKHKYKLDPDVPQFIQARVNAFNLSDANYKADWKKTIAKGYDLKPDAIPIIAAKASRNIASDYKYKESYEKDKGRQVGYRSLQDDPKLVHYMHVAKMQSDREYKKDYEVTKTKYHTPLDMFSVTAAKKAQEAVTNTGYKQLIHHYTLLPDSVNLELSRNMMQLQSDNMYKADFNNWLRGVGWLPIQSLEVEKAKKASEILSEKKYRQHPDKLKYSIPLDAMEQVLAKQNAKTMNKRLYTDKWNKEKTSIHVMPDTPEILQSRVNQITMSNKLYKAGWEEDKKKGYDMRPDAIPIKAAKTSQDIASDYKYKLAHEKAKGKHIGFRSLEDDPKLVHFMQVAKMQSDREYKKDYEKAKTNFHTPVDMLSVVAAKKAQEVATNANYKNLIHVYNVLPDAMSLELAKNMMQIQSNNQYRAEYDESMKGVGWMPLGSLEAEKNKKAMEILSEKKYRQHPDKLKYSVPVDSMNMALALHNAKIMDEHQYKQAWEEDKKKVHMTPDIPQFALAKANAFNISDKMYRHSFEEARKKGYDLRSDAIPIKAAKASRDIASDYKYKLGYEQDKGKLVGFRSLQDDPKLVHYMQVAKMQSDREYKKAYETSKTHYQTPSDALSIMAAKEAQDRVTNANYKRLIHHYMLLPDAMSFELYRNMNQIQSNNEYKQDYNEWFKGIGWSPAGSLDVEKSKKATEIASDQKYRQHPSIFPFTKQIDAMDMVLAKHNADIMNKHAYTQAWEKDKTQVHVMPDTPDILQAKQNKANYSQKQYKLDWQEMIKKGYDLTPEAISVKAAKASRDIASDYKYKEGYRKQQGHHIGFRSLQDDPKMMWSMQVAKMQSEREYKKDFEKWKTKFNMPVDMLGFLLAKKCQELVSDIDYKHMLHRWTCLPDQNDVTQAKRVYELQSDNLYKSDLQWLRGIGWSPLGSLESEKNKKASEILSEKKYRQHPDTIKFTSIPDAMNIILAKSNAKNRSDILYREAWDKDKTQVHIMPDTPEILLAKSNLINTSDKHYKLGYEELRRKGYDLPPDAIPLKSAKASRDIASEYQYKTAYRKQLGHHVGARNIEDDPKMMWSMHVAKIQSDREYKKAFEKTKTHFSSPVDMLGIVLAKKCQELVSDVDYKHLLHRWTCLPDQNDVVQARKVYDLQSDNVYKSDLQWLRGIGWSPLGSLDEEKNKRASMILSDKKYRQHPDTIKFTSLPDSMPMVLAKHNSEIMNHRSYIAAWEKDKTSIHIMPDTPGILLAQQNKVNYSEKMYRLAMEEDKKKGYDLRADAIPIKAAKASRDIASDYKYKEGYRKQLGHHIGARNIEDDPKMMWSMHVAKVQSDREYKKAFEKTKTHFSSPVDMLGIVLAKKCQELVSDVDYKHLLHRWTCLPDQNDVVQARKVYDLQSDNVYKSDLQWLRGIGWSPLGSLDEEKNKRASMILSDKKYRQHPDTIKFTSLPDSMPMVLAKHNSEIMNHRSYIAAWEKDKTSIHIMPDTPGILLAQQNKVNYSEKMYRLAMEEDKKKGYDLRADAIPIKAAKASRDIASDYKYKEGYRKQLGHHIGARNIEDDPKMMWSMHVAKVQSDREYKKAFEKTKTHFSSPVDMLGIVLAKKCQELVSDVDYKHLLHRWTCLPDQNDVVQARKVYDLQSDNVYKSDLQWLRGIGWSPLGSLDEEKNKRASMILSDKKYRQHPDTIKFTSLPDSMPMVLAKHNSEIMNHRSYIAAWEKDKTSIHIMPDTPGILLAQQNKVNYSEKMYRLAMEEDKKKGYDLRADAIPIKAAKASRDIASDYKYKEGYRKQLGHHIGARNIEDDPKMMWSMHVAKVQSDREYKKAFEKTKTHFSSPVDMLGIVLAKKCQELVSDVDYKHLLHRWTCLPDQNDVVQARKVYDLQSDNVYKSDLQWLRGIGWSPLGSLDEEKNKRASMILSDKKYRQHPDTIKFTSLPDSMPMVLAKHNSEIMNHRSYIAAWEKDKTSIHIMPDTPGILLAQQNKVNYSEKMYRLAMEEDKKKGYDLRADAIPIKAAKASRDIASDYKYKEGYRKQLGHHIGARNIEDDPKMMWSMHVAKIQSDREYKKAFEKTKTHFSSPVDMLGIVLAKKCQELVSDVDYRHYLHQWICLPDQNDVIHARKAYDLQSDNFYKSDLEWMRGIGWVPIGSLDIEKAKRAGQILSDKVYRQPPDTIKFTSVTDSLEMTLAKHNAEMMNKRLYTEAWDKDKTQIHIMPDTPEITLAKQNMHNYSEKLYKQAMEEAKKKGYDLRSDAIPIQAAKASRQIASDYKYKEGYRKQLGHHIGARNIEDDPKMMWSMHVAKIQSDREYKKAFEKTKTHFSSPVDMLGIVLAKKCQELVSDVDYRHYLHQWICLPDQNDVIHARKAYDLQSDNFYKSDLEWMRGIGWVPIGSLDVEKAKRAGQILSDKVYRQPPDTIKFTSVTDSLEMTLAKHNAETMNKRLYTEAWNKDKTTIHVMPDTPEILLAKQNQAHYSQKMYKLALEESKKKGHDLRFDAIPIQAAKASREIASDYKYKEGYRKQLGHHIGARNIEDDPKMMWSMHVAKIQSDREYKKAFEKTKTHFSSPVDMLGIVLAKKCQELVSDVDYRHYLHQWICLPDQNDVIHARKAYDLQSDAVYKSDLEWLKGIGWVPIGSLDVEKAKKAGEILSDRKYRQPADQIKFTSVTDSLAMMLAKHNAEIMNKRLYTEAWDADKTSIHVMPDTPTILLAKANAANVSHKHYVQAWEDAKKKGYDMRADAIPIRSAKASRDIASDYKYKEAHEKQKGHYIGCRTAKEDPKLSWAARAMLLQNDRIYRKAYNDSKAHIHMPVDAMSLQAAKECQTLVSDVDYRHYLHQWTCLPDQNDVMHARKAYDLQSDNVYKSDLEWLRGIGWLTEGSVDVIKAKKAQEILSDRLYRTQPDKMKFTSITDTPDVVQAKINAMQLSNHLYREVWDKDKTQISIPSDTPELLQSKLNALNISNKHYQKAWDEAKAKNYDLRADAIPIKHAKASRDIASEYKYKEAHEKQKGHYIGCRTAKEDPKLSWAARAMLLQNDRIYRKAYNDSKAHIHMPVDAMSLQAAKECQTLVSDVDYRHYLHQWTCLPDQNDVMHARKAYDLQSDNVYKSDLEWLRGIGWLTEGSVDVVKAKKAQEILSDRLYRTQPDKMKFTSVTDAPDVVQAKINAMQLSNRLYREAWDKDKTQISIPSDTPEMLQSKVNALNISNKHYQKAWDEAKAKNYDLRADAIPIKHAKASRDIASEYKYKEAHEKQKGHYIGCRTAKEDPKLSWAARAMLLQNDRIYRKAYNDSKAHIHMPVDAMSLQAAKECQTLVSDVDYRHYLHQWTCLPDHNDVVHARKAYDLQSDAVYKSDLEWLRGIGWLPNDSPGVQRVKHAQDLLSDKVYRTPIDSVKYTSVVDSPDILLAKMNAEQLSIPKYKEAWEKDKTMIHIMPDTPEITLARSNAHNYSQKLYKEAWDEVKMSYDLRADAIPIKAAKASREIASDYKYKLDHEKQKGHYVGVPNAKADTKIRFALGIGKVQSELEYKKHFAKWKTQCHLPVDMLSIQSAKHGQSLVSDVDYRHYLHQWICLPDQNDVIHARKAYDLQSDAVYKSDLEWLRGIGWLPNDSLGINHVKHAGDLLNERKYRTKAETLHFTPVADRVDYVTAKKSGEILSDIKYHKDWNEVKSNYTLTDTPQLDMAREAARILNQSLYKESWEKEKATGYLLPPDTVQIRHAKHSNDVQSELKYKADYVKQRGHYVGVASMRDDPKLVWFEHAGEIQNDRLYKSNYHKTKSKIHIPADIMSVVAAKECQALVSDVDYRHYLHQWTCHPDQNDCIQARKAYDLQSDNIYKSDLEWLRGCGWIPLGSVEHKKVKHAQELINKRAYTKDAIENFSKYTSVVDTPDIVLAKINSVNQSDLKYKETFNLEKGQYIGSDDTPELNHARDMSLLYSDKLYKRDWEVCKPIGYTLDAKYIPLVGAKHANYVNSELKYKEIYEKLKGHYLAGKDIGDFPSVVHSLAFQKIRSALAYRKNYEDTKTRVHIPSDMMNHVLAKKCQYILSDLEYRTYLHHWNCSPEEHDVIQARRAQEILSDVVYKDDLNWLKGIGCYVWDTPQILHAKKSYDLQSQIKYTAAGKENFQNFGVVTDTPVYVTAVQSGINASDVKYKEDYHKTKDKYTTVTETADSERVQNLKHLFSNNLYKEAWDRVKATSYIMPSDAVSLARAKELKHNASIVKYREEYDKFKALYTLPRSVEDDPNTARCLRVGKLNIDRLYKETYEKNKAKVHIIPDMVDIIAAKDAQKKISEIDYRTHLHDWICLPDLQINAHVRKVADQISDVVYKDDLNWLKGIGCFVWDTPEILHAKHAYDLRSDIKYKSDADKMKSKYTVVMDTPVYVQNILSGLNASEVIYRGDYLKKVRGKMIPTDKTVDLQRAHHANKIQSENLYRWAGLKALPTGYSLPKDTPGFQHAKHVQHIGSDLKYKEAYEHMKAKGYTLGPNDVGFENVKKVNQVINERLYRATYHKNKDKIHTTPDTPEIRQVRATQEAVSDLIYKSDFFKLQGHLISLPFTPQVLHCRYVGDITSDNKYKEDLKWLQGLGCFLYDTPDMVRARQLRKLWSNYVYTDSAKKMRDKYSVVLDTPGYRTVQELKTHLSDLVYRAAGKELKTKYTSVLNTPDFLRAKEGQRIQSQYLYVALATKERPHHHAGNQTPAFTHARHVKDMVSETKYKIQYEKMKDKYTPVLDTPILIRAKRAYLNASDLRYKETFENTKGKYHTVKDALDIVYHRKVTDDISSVKYKENYMSQLGIWRSIPDRPEHFHHRAVTDAISDVKYKEDLSWLRGIGCYAWDTPDFALAEKNKVLYSGHKYKETFEKTKSHFKYVADSPINRHFKHATQLLDANSYKSLAKMLLKQGCNEILRPDILTALYNSYLWSQVEYKKDYEKKKDKYTTVVDTPENIRTAKVNKQISDIIYKLEYNKAKPKGYTTIHDTPMLLHVRKVKDRISDLKYKELYERNKSHCNVVADSVHIKTPRHAYKLNSNLDYKKKYEAAKAHWHWIADRPDFVQAAKSSLQQSDYEYKLDREYLKGCKLSVTDDKNTVLALNNAILASDIKYKEKHNKARGTCLVVPDTPQILLAKNVSSLVSENKYKEHSKKQLPRGSYTTLPETRDTAHVKEVTKNVSDTNYKKKFVKEKGKSNYSIMLEPPEVKHAMEVAKKQSTVEYKKDAKSKLHYTPIADRPDIKKATQAAKLISDIEYKKRGEAGLGVTMLGRPDIELAKEVSKLTSQVKYKENFSKEKGKKPKYDLKEAKIYKTMKDAHNIASEVKYKADLKKLHKPVTDMSESLIMNHVLNTSQLASAVKYKEKYEKEKGKPMLDFETPTYLTAKESQLMQSEKEYRKDLEEGVKGKGLSVLEETPDMLRAKNATQILNEKEYKKALELEIKGKGLSELALETPDFVRAKNATDIASQIKYKQLAEMEKANYTSVVDTPEIIHAQQVKNLSSQKKYKEEAEKTMPYYVPVADTPEMQRVRENQKNFSTLQYQWDLQNSKGKVTVVQDTPEMLRVKENQKNFSSIKYKESIGKGTPIPDLPEVKRVKETQKHISSVLYKEHLAKGTPTPMTPEMERAKRNQENISSVLYSDSFRKQVQGKAAYVLDTPEMRRVRETQKHISTVKYHEDFEKNKGTFTPVVTDPITERVKKNMHDFSDISYRGIQRRVVEMEQKRVDQDQENLTGLRVWRTNPGSVFDYDPAEDNIQSRSLHMISVQAQRRSREHSRSASALSISGGDEKSEPSEGVNQHLSYYSSGGFFTTTATVGYKHAKTIELPQQRSASVATQQTTVSSVPSHPSTAGKTYRAMYDYTAADADEVSFKDGDTIVNVQAIDEGWMYGTVQRTGKTGMLPANYVEAV

SEQ ID NO: 65 - protein, 6754 aa, Gallus gallus
MEEEEYEEVVEYYIEETIVEEGEPYEVVTEITDSTSTEFTGPTTITRTIEYEKTSGEGAATPVRKKTIRTKMDTSKFLTPYLQHSNKMKDLFSENKYKEKFNKERGKPYASTIDTPEIRRIKKVQEQLSEVKYRMAGEAARTICHVDEKAWDIEHAKKVSQQVSKVLYKQNWEENKDKYLLPPDAPELVNAIKNTAMFSKKLYTEDWEGDKTLFYPYNDSPELRRVAQAQKALSDIVYKKGHDERKSKYTSLPDPPDVEQAKKVTRQLSDIIYHDDYKNKIKGKWSQTPCYDVVIAKMNAENLSMKKYQEDFENVKDQIYFMQTETPEYEANKRVSDNVSKIKYRADYEKNKAIADYNVLPATENPLLRQLKTAGDVLSDKLYKEAYERSKGTSMNYCETPKFQTDNALKNFSDVKYKDAYQKNILGHYLGSFEDPHQIHCMKVEAMKSDKNYKADYEEEKTKCYFPQTITQEYEAIKKLEQCKDHTYKKHPDQIKFTPVTDSPVQKQAEINSKQLSDKLYRSSGEEVKHKYTLPPDVPQFIQARYNAANVSDAYYKQDYHDLIAKGNNVSLDAIPITRAKASRNIASDYKYKEAYEKAKGQQVGFKSLQDDPKLVHYMHVAKIQSDREYKKDYEKSKTNYHTPPDTFSIQAAKKSQDVASTAHYKNLIHHYTYLPDAMDVELAKNMMQIQSDNVYKQDYNSWFKGIGWSPLGSLDVEKAKKAGDALNEKKYRQHPDTIKFTSVPDSMTMVLAQHNTKQLSDVAYKQEGEKVKHKYKLDPDVPQFIQARVNAFNLSDANYKADWKKTIAKGYDLKPDAIPIIAAKASRNIASDYKYKESYEKDKGRQVGYRSLQDDPKLVHYMHVAKMQSDREYKKDYEVTKTKYHTPLDMFSVTAAKKAQEAVTNTGYKQLIHHYTLLPDSVNLELSRNMMQLQSDNMYKADFNNWLRGVGWLPIQSLEVEKAKKASEILSEKKYRQHPDKLKYSIPLDAMEQVLAKQNAKTMNKRLYTDKWNKEKTSIHVMPDTPEILQSRVNQITMSNKLYKAGWEEDKKKGYDMRPDAIPIKAAKTSQDIASDYKYKLAHEKAKGKHIGFRSLEDDPKLVHFMQVAKMQSDREYKKDYEKAKTNFHTPVDMLSVVAAKKAQEVATNANYKNLIHVYNVLPDAMSLELAKNMMQIQSNNQYRAEYDESMKGVGWMPLGSLEAEKNKKAMEILSEKKYRQHPDKLKYSVPVDSMNMALALHNAKIMDEHQYKQAWEEDKKKVHMTPDIPQFALAKANAFNISDKMYRHSFEEARKKGYDLRSDAIPIKAAKASRDIASDYKYKLGYEQDKGKLVGFRSLQDDPKLVHYMQVAKMQSDREYKKAYETSKTHYQTPSDALSIMAAKEAQDRVTNANYKRLIHHYMLLPDAMSFELYRNMNQIQSNNEYKQDYNEWFKGIGWSPAGSLDVEKSKKATEIASDQKYRQHPSIFPFTKQIDAMDMVLAKHNADIMNKHAYTQAWEKDKTQVHVMPDTPDILQAKQNKANYSQKQYKLDWQEMIKKGYDLTPEAISVKAAKASRDIASDYKYKEGYRKQQGHHIGFRSLQDDPKMMWSMQVAKMQSEREYKKDFEKWKTKFNMPVDMLGFLLAKKCQELVSDIDYKHMLHRWTCLPDQNDVTQAKRVYELQSDNLYKSDLQWLRGIGWSPLGSLESEKNKKASEILSEKKYRQHPDTIKFTSIPDAMNIILAKSNAKNRSDILYREAWDKDKTQVHIMPDTPEILLAKSNLINTSDKHYKLGYEELRRKGYDLPPDAIPLKSAKASRDIASEYQYKTAYRKQLGHHVGARNIEDDPKMMWSMHVAKIQSDREYKKAFEKTKTHFSSPVDMLGIVLAKKCQELVSDVDYKHLLHRWTCLPDQNDVVQARKVYDLQSDNVYKSDLQWLRGIGWSPLGSLDEEKNKRASMILSDKKYRQHPDTIKFTSLPDSMPMVLAKHNSEIMNHRSYIAAWEKDKTSIHIMPDTPGILLAQQNKVNYSEKMYRLAMEEDKKKGYDLRADAIPIKAAKASRDIASDYKYKEGYRKQLGHHIGARNIEDDPKMMWSMHVAKVQSDREYKKAFEKTKTHFSSPVDMLGIVLAKKCQELVSDVDYKHLLHRWTCLPDQNDVVQARKVYDLQSDNVYKSDLQWLRGIGWSPLGSLDEEKNKRASMILSDKKYRQHPDTIKFTSLPDSMPMVLAKHNSEIMNHRSYIAAWEKDKTSIHIMPDTPGILLAQQNKVNYSEKMYRLAMEEDKKKGYDLRADAIPIKAAKASRDIASDYKYKEGYRKQLGHHIGARNIEDDPKMMWSMHVAKVQSDREYKKAFEKTKTHFSSPVDMLGIVLAKKCQELVSDVDYKHLLHRWTCLPDQNDVVQARKVYDLQSDNVYKSDLQWLRGIGWSPLGSLDEEKNKRASMILSDKKYRQHPDTIKFTSLPDSMPMVLAKHNSEIMNHRSYIAAWEKDKTSIHIMPDTPGILLAQQNKVNYSEKMYRLAMEEDKKKGYDLRADAIPIKAAKASRDIASDYKYKEGYRKQLGHHIGARNIEDDPKMMWSMHVAKVQSDREYKKAFEKTKTHFSSPVDMLGIVLAKKCQELVSDVDYKHLLHRWTCLPDQNDVVQARKVYDLQSDNVYKSDLQWLRGIGWSPLGSLDEEKNKRASMILSDKKYRQHPDTIKFTSLPDSMPMVLAKHNSEIMNHRSYIAAWEKDKTSIHIMPDTPGILLAQQNKVNYSEKMYRLAMEEDKKKGYDLRADAIPIKAAKASRDIASDYKYKEGYRKQLGHHIGARNIEDDPKMMWSMHVAKIQSDREYKKAFEKTKTHFSSPVDMLGIVLAKKCQELVSDVDYRHYLHQWICLPDQNDVIHARKAYDLQSDNFYKSDLEWMRGIGWVPIGSLDVEKAKRAGQILSDKVYRQPPDTIKFTSVTDSLEMTLAKHNAETMNKRLYTEAWNKDKTTIHVMPDTPEILLAKQNQAHYSQKMYKLALEESKKKGHDLRFDAIPIQAAKASREIASDYKYKEGYRKQLGHHIGARNIEDDPKMMWSMHVAKIQSDREYKKAFEKTKTHFSSPVDMLGIVLAKKCQELVSDVDYRHYLHQWICLPDQNDVIHARKAYDLQSDAVYKSDLEWLKGIGWVPIGSLDVEKAKKAGEILSDRKYRQPADQIKFTSVTDSLAMMLAKHNAEIMNKRLYTEAWDADKTSIHVMPDTPTILLAKANAANVSHKHYVQAWEDAKKKGYDMRADAIPIRSAKASRDIASDYKYKEAHEKQKGHYIGCRTAKEDPKLSWAARAMLLQNDRIYRKAYNDSKAHIHMPVDAMSLQAAKECQTLVSDVDYRHYLHQWTCLPDQNDVMHARKAYDLQSDNVYKSDLEWLRGIGWLTEGSVDVIKAKKAQEILSDRLYRTQPDKMKFTSITDTPDVVQAKINAMQLSNHLYREVWDKDKTQISIPSDTPELLQSKLNALNISNKHYQKAWDEAKAKNYDLRADAIPIKHAKASRDIASEYKYKEAHEKQKGHYIGCRTAKEDPKLSWAARAMLLQNDRIYRKAYNDSKAHIHMPVDAMSLQAAKECQTLVSDVDYRHYLHQWTCLPDQNDVMHARKAYDLQSDNVYKSDLEWLRGIGWLTEGSVDVVKAKKAQEILSDRLYRTQPDKMKFTSVTDAPDVVQAKINAMQLSNRLYREAWDKDKTQISIPSDTPEMLQSKVNALNISNKHYQKAWDEAKAKNYDLRADAIPIKHAKASRDIASEYKYKEAHEKQKGHYIGCRTAKEDPKLSWAARAMLLQNDRIYRKAYNDSKAHIHMPVDAMSLQAAKECQTLVSDVDYRHYLHQWTCLPDHNDVVHARKAYDLQSDAVYKSDLEWLRGIGWLPNDSPGVQRVKHAQDLLSDKVYRTPIDSVKYTSVVDSPDILLAKMNAEQLSIPKYKEAWEKDKTMIHIMPDTPEITLARSNAHNYSQKLYKEAWDEVKMSYDLRADAIPIKAAKASREIASDYKYKLDHEKQKGHYVGVPNAKADTKIRFALGIGKVQSELEYKKHFAKWKTQCHLPVDMLSIQSAKHGQSLVSDVDYRHYLHQWICLPDQNDVIHARKAYDLQSDAVYKSDLEWLRGIGWLPNDSLGINHVKHAGDLLNERKYRTKAETLHFTPVADRVDYVTAKKSGEILSDIKYHKDWNEVKSNYTLTDTPQLDMAREAARILNQSLYKESWEKEKATGYLLPPDTVQIRHAKHSNDVQSELKYKADYVKQRGHYVGVASMRDDPKLVWFEHAGEIQNDRLYKSNYHKTKSKIHIPADIMSVVAAKECQALVSDVDYRHYLHQWTCHPDQNDCIQARKAYDLQSDNIYKSDLEWLRGCGWIPLGSVEHKKVKHAQELINKRAYTKDAIENFSKYTSVVDTPDIVLAKINSVNQSDLKYKETFNLEKGQYIGSDDTPELNHARDMSLLYSDKLYKRDWEVCKPIGYTLDAKYIPLVGAKHANYVNSELKYKEIYEKLKGHYLAGKDIGDFPSVVHSLAFQKIRSALAYRKNYEDTKTRVHIPSDMMNHVLAKKCQYILSDLEYRTYLHHWNCSPEEHDVIQARRAQEILSDVVYKDDLNWLKGIGCYVWDTPQILHAKKSYDLQSQIKYTAAGKENFQNFGVVTDTPVYVTAVQSGINASDVKYKEDYHKTKDKYTTVTETADSERVQNLKHLFSNNLYKEAWDRVKATSYIMPSDAVSLARAKELKHNASIVKYREEYDKFKALYTLPRSVEDDPNTARCLRVGKLNIDRLYKETYEKNKAKVHIIPDMVDIIAAKDAQKKISEIDYRTHLHDWICLPDLQINAHVRKVADQISDVVYKDDLNWLKGIGCFVWDTPEILHAKHAYDLRSDIKYKSDADKMKSKYTVVMDTPVYVQNILSGLNASEVIYRGDYLKKVRGKMIPTDKTVDLQRAHHANKIQSENLYRWAGLKALPTGYSLPKDTPGFQHAKHVQHIGSDLKYKEAYEHMKAKGYTLGPNDVGFENVKKVNQVINERLYRATYHKNKDKIHTTPDTPEIRQVRATQEAVSDLIYKSDFFKLQGHLISLPFTPQVLHCRYVGDITSDNKYKEDLKWLQGLGCFLYDTPDMVRARQLRKLWSNYVYTDSAKKMRDKYSVVLDTPGYRTVQELKTHLSDLVYRAAGKELKTKYTSVLNTPDFLRAKEGQRIQSQYLYVALATKERPHHHAGNQTPAFTHARHVKDMVSETKYKIQYEKMKDKYTPVLDTPILIRAKRAYLNASDLRYKETFENTKGKYHTVKDALDIVYHRKVTDDISSVKYKENYMSQLGIWRSIPDRPEHFHHRAVTDAISDVKYKEDLSWLRGIGCYAWDTPDFALAEKNKVLYSGHKYKETFEKTKSHFKYVADSPINRHFKHATQLLDANSYKSLAKMLLKQGCNEILRPDILTALYNSYLWSQVEYKKDYEKKKDKYTTVVDTPENIRTAKVNKQISDIIYKLEYNKAKPKGYTTIHDTPMLLHVRKVKDRISDLKYKELYERNKSHCNVVADSVHIKTPRHAYKLNSNLDYKKKYEAAKAHWHWIADRPDFVQAAKSSLQQSDYEYKLDREYLKGCKLSVTDDKNTVLALNNAILASDIKYKEKHNKARGTCLVVPDTPQILLAKNVSSLVSENKYKEHSKKQLPRGSYTTLPETRDTAHVKEVTKNVSDTNYKKKFVKEKGKSNYSIMLEPPEVKHAMEVAKKQSTVEYKKDAKSKLHYTPIADRPDIKKATQAAKLISDIEYKKRGEAGLGVTMLGRPDIELAKEVSKLTSQAEYLKRHMRGHGAASYDTPWMRTFKKANMLSSHVKYKENFSKEKGKKPKYDLKEAKIYKTMKDAHNIASEVKYKADLKKLHKPVTDMSESLIMNHVLNTSQLASAYQYKKQYEKSKGHYHMVPDNLEQVHLREASELQSHVKYKEKYEKEKGKPMLDFETPTYLTAKESQLMQSEKEYKRDFEESIKGRNLTGLEITPSLLHVKYATKIASEKEYRKDLEEGVKGKGLSVLEETPDMLRAKNATQILNEKEYKKALELEIKGKGLSELALETPDFVRAKNATDIASQIKYKQLAEMEKANYTSVVDTPEIIHAQQVKNLSSQKKYKEEAEKTMPYYVPVADTPEMQRVRENQKNFSTLQYQWDLQNSKGKVTVVQDTPEMLRVKENQKNFSSILYKEDIGTGTTIEKTPEMQRVKRTQDAISSIKYKESIGKGTPIPDLPEVKRVKETQKHISSVLYKEDLGTGIPTPVTPEIERVKRNQEHISSVLYKEELGTGTPIPVTPEVERVKRNQEHISSVLYKESVGTGTPTPITPEMERVKRNQEICSSVLYKENIGKATPTPVTPEMERVKRNQEIISSVLYKENVGKVTPTPITPEMERVKRNQEIISSVLYKESLGRATPTPITPEMERVKRNQEQISSVVYKEGLGKATPTPVTPEMERVRRNQEQISSVLYKEHLAKGTPTPMTPEMERAKRNQENISSVLYSDSFRKQVQGKAAYVLDTPEMRRVRETQKHISTVKYHEDFEKNKGTFTPVVTDPITERVKKNMHDFSDISYRGIQRRVVEMEQKRVDQDQENLTGLRVWRTNPGSVFDYDPAEDNIQSRSLHMISVQAQRRSREHSRSASALSISGGDEKSEPSEGVNQHLSYYSSGGFFTTTATVGYKHAKTIELPQQRSASVATQQTTVSSVPSHPSTAGKTYRAMYDYTAADADEVSFKDGDTIVNVQAIDEGWMYGTVQRTGKTGMLPANYVEAV

SEQ ID NO: 66 - protein, 6909 aa, Bos taurus
MADDEEYEEVVEYYTEETVYEEVPGETRTRFYETTTTRTSDYEQSETSRPALAQPVPEKPVERKRVIRKKVDPSKFMTPYIAHSQKMQNLFSTNKYKENYEKAKGKPYAITTDTPELRRIKKVQDQLSEVKYRVDGDVAKTICHVDEKAKDIEHAKKVSQQVSKVLYKQNWEDTKDKYLLPPDAPELVQAIKNTAMFSKKLYTEDWEADKTMFYPYNDSPELRRVAQAQKALSDIAYKKGLAEQQTQFTSLPDPPDIEFAKKVTNQVSKQKYKEDYENKVKGKWSETPCFEIATARMNSNNISTKKYQEDFEHMKDQIYFMQTETPEYKVNKQAGVAASKVKYKQDYEKNKGKADYNVLPASENPLLRQLKAAGDALSDKLYKENYEKTKAKSINYCETPKFKLDTVLHNFSSDTKYKDSYLKDILGHYVGSYEDPYHTHCMRVSAQNSDKNYKAEYEEDRGKGFFPQTITQEYEAIKKLDQCKDHTYKVHPDKTKFTQVTDSPVLMQAQVNSKQLSDLNYKAKHENEKFKCHIPPDTPAFIQHKLNAYNLSDNIYKHDWEKTKAKKFDIKVDAIPLLAAKANTKIASDVMYKKDYEKSKGKMIGALSINDDPKMLHSLKTAKNQSDRLYKENYEKTKAKSMNYCETPKYQLDTLLKNFSEAKYKDSYVQNVLGHYIGSFEDPYQVHCLKISAQNSDKNYKAEYEEDKGKCYFPQTITQEYEAIKKLDQCKDHTYKVHPDKTKFTAVTDTPVLLQAQLNTKQLSDLNYKAKHEGEKFKCHIPADAPQFIQHRVNAYNLSDNIYKHDWEKTKAKKFDIKVDAIPLLAAKANTKIASDVMYKKDYEKSKGKMIGALSINDDPKMLHSLKTAKNQSDHEYRKDYEKSKTIYTAPLDMLPLTHAKKSQAIASDVDYKHLLHNYSYPPDSVNVDLAKKAYALQSDVEYKADYNSWMKGCGWMPFGSLEMEKAKRASDILNEKKYRQHPDTLKFTSIEDAPIIVQSKINQAQRSDVAYKAKGEEVIHKYSLPADLPQFIQAKVNAYNISENLYKADLKDLSKKGYDLRIDAIPIKAAKAARQAASDVQYKKDYEKAKGKMVGFQSLQDDPKLVHYMNVAKIQSDREYKKAYEKTKTRHNTPHDMVNIVAAKKAQDVASNVNYKHSLHHYTYLPDAMDLELSKNMMHIQSDNVYKEDYNNWMKGIGWIPIGSLEVEKVKKAGDALNEKKYRQHPDTLKFTSIVDSPVMVQAKQNTQQVSDILYKAKGEDVKHKYTMSPDLPQFLQAKCNAYNLSDVCYKRDWHDLIAKGTNVLGDAIPITAAKASRNIASDYKYKEAYEKAKGKQVGFRSLQDDPKLVHYMNVAKLQSDREYKKNYENTKTSYHTPGDMVSITAAKMAQDVATNVNYKQPIHHYTYLPDALSLEHIRNVNQIQSDNVYKDEYNHFFKGMGWIPIGSLEVEKVKKAGDALNEKKYRQHPDTIKFTSVPDSMGMVLAQHNTKQLSDLNYKVEGEKVKHKYTMDPDVPQFIQAKVNAYNMSDSHYKADWKKTLAKGYDLRPDAIPIVAAKSSRNIASDFKYKEAYEKTKGKQIGFRSLQDDPKLVHFMNVAKMQSDREYKKGYEASKTKYHTPLDMLSVTAAKKSQEVATNTNYKQPFHHYTLLPDALNVEHSRNAMQIQSDNLYKSDFTNWMKGIGWLPLESLEVEKAKKAGEILSEKKYRQHPEKLKFTYAMDTMEQALNKSNKLIMDKRLYTEKWNKDKTTIHVMPDTPDILLSRVNQITMSDKLYKAGWEEEKKKGYDLRPDAISIKAARASRDIASDYKYKQAYEQAKGKQIGFRSLEDDPKLVHFMQVAKMQSDREYKKAYEKSKTSFQTPVDMLSVVAAKKSQEVATNANYRNVIHTYNMLPDAMSLELAKNMMQIQSDNQYKADYADFMKGIGWLPLGSLEAEKNKKAMEIISEKKYRQHPDTLKYSTLMDSMNMVLAKNNAKIMNEHLYKQAWEADKTKVHIMPDIPQIILAKANAINISDKLYKLSLEEAKKKGYDLRTDAIPIKAAKASRDIASDYKYKHSYEKERGKMVGFRSLEDDPKLVHSMQVAKMQSDREYKKNYEKTKTSYHTPADMLSVTAAKDAQANITNTNYKHLIHKYILLPDAMNIQLSKNMNRIQSDNEYKQDYNEWYKGLGWSPAGSLEVEKAKKATEYASDQKYRQHPSNFQFTKLNDSMDMVLAKQNAHTMNKYLYTVDWNKDKTKIHVMPDTPDILQAKQNQTMYSQVKYKMGWPSGLERVVNLPSVLIKIFKSKQNKDLIWRFKYKQGYRKQIGHHIGFRSLQDDPKLVLSMNVAKMQSEREYKKDFEKWKTKFSSPVDMLGVVLAKKCQALVSDVDYKNYLHGWTCLPDQNDVIHAKKAYDLQSENLYKSDLEWLKGIGWSPLGSLEAEKNKRASEIISEKKYRQPPDRNKFTSIPDAMDIVLAKTNAKNRSDILYREAWDKDKTQIHIMPDTPDIILAKANLINTSDKFYRMGYEELRKKGYDLPVDAIPIKAAKASREIASEYKYKEGFRMQLGHHIGARNIKDDPKMMWSMHVAKIQSDREYKKDFEKWKTKFSSPVDMLGVVLAKKCQTLVSDIDYKNYLHQWTCLPDQSDVIHARRAYDLQSDNLYKSDLQWLRGIGWLPSGSLEDEKNKRASQILSDHVYRQHPDQFKFSSLMDSIPMVLAKNNAITMNHRLYTEAWDKDKTTVHIMPDTPEVLLAKQNQINYSEKLYKLGLDEAKRKGYDMRIDAIPIRAAKASRDIASEFKYKEGYRRQLGHHIGARAIHDDPKMMWSMHVAKIQSDREYKKDFEKWKTKFSSPVDMLGVVLAKKCQTLVSDIDYKNYLHQWTCLPDQSDVIHARQAYDLQSDNVYKSDLQWLRGIGWVPIGSLDVEKSKRASEILSDKLYRQPPDKFKFTSVTDSLEQVLAKNNAINMNKRLYTEAWDKDKTQVHIMPDTPEITLARTNKVNYSENLYKLAHEEAKKKGYDLRSDAIPIIAAGLEKDHISDYKYKDGYRKQLGHHIGARDIKDDPKMMWSMHVAKIQSDREYKKDFEKWKTKFSSPVDMLGVVLAKKCQTLVSDIDYKNYLHQWTCLPDQSDVIHARQAYDLQSDNVYKSDLQWLRGIGWVPIGSVDVVKCKRAAEILSDNLYRQPPDTLKFTSVPDSLEQVLAKNNAINMNKRLYTEAWDKDKTQIHIMPDTPEIMLARQNKLNYSETLYKLANEEAKKKGYDLRSDAIPIVAAKASRDIISDYKYKDGYRKQLGHHIGARDIKDDPKMMWSMHVAKIQSDREYKKDFEKWKTKFSSPVDMLGVVLAKKCQTLVSDIDYKNYLHQWTCLPDQSDVIHARRAYDLQSDNIYKSDLQWLRGIGWVPIGSVDVVKCKRAAEILSDNLYRQRPDTLKFTSVPDSLEQVLAKNNAINMNKRLYTEAWDKDKTQIHMMPDTPEITLARQNKINYSENLYRQAMEEAKKEGYDLRSDAIPIVAAKASREIASDYKYKEAYRKQLGHHIGARAIHDDPKMMWSVHVAKMQSDREYKKDFEKYKTRFSSPVDMLGIVLAKKCQTLVSDVDYKHPLHEWTCLPDQNDIIHARKAYDLQSDNLYKSDLEWLKGIGWVPIGSVEVLKAKRAGEILSDNIYRQRPDTLKFTSVTDSPEQVLAKNNAINMNKRLYTEAWDNDKKTIHVMPDTPEIMLAKLNRINYSDKLYKLALEESRKEGYDLRLDAIPIQAAKASREIASDYKYKEGYRKQLGHHIGARNIKDDPKMMWSIHAGKLQSDLEYKKDFEKWKTKFSSPVDMMGLVQAKKCQILVSDIDYKNLLHEWTCLPDQNDIIQARKAYDLQSDAIYKADLEWLRGIGWVPIDSVGVEHAKRAGEILSERKYRQPAVQLKFTSITDTPEIVLAKNNALNVSKHLYTEAWDADKTSIHVMPDTPEILLAKSNSANISHKLYTKGWDESKMKDYDLRADAISIKSAKASRDIASDYKYKEAYEKHKGHHIGARSVEDDPRIMCAMNAGRIQSEREYKKEFQKWKTKFSSPVDMLGILLAKKCQTLVSDIDYRNYLHHWTCLPDQNDIIQARKAYDLQSDAIYKADLEWLRGIGWMPEGSPEVLRVKNAQHIFRDSVYRTPVVKLKYTSIVDTPEVVLAKSNAENISIPKYREVWDKDKTSIHIMPDTPEINLARTNALNVSNKLYREGWDEMKMSCDVRLDAIPIQAAKASREIASDYKYKLDHEKQKGHYVGTRTARDDNKIRWALIAGKIQNEREYRLHWAKWKSKFQSPPDMLSIEHSKNSQTLVSDIDYRHYLHQWTCMPDQNDVIQARKAYDLQSDAIYKADLEWLRGIGWMPADSVSVNHAKHMADIFNEKKYRTKIETLSFTPVDDRVDYVTAKHSGEILNDIKYRKDWNDTKSKYTLTETPQLHTAQEAARILDQYLYKESWEKQKATGYILPPDAVPFVHAHHSGDVQSELKYKAEHVKQKGHYVGVPTMRDDPKLVWFEHAGQIQNDRLYKENYHKTKAKIHIPPDMVSVLAAKEGQALASDIDYRNYLHQWICHPDQNDVIQARKAYDLQSDNIYKADLEWLRGIGWIPLDSVDHVRVTRNQEMMNQIKYKKDALANYPNFTSVVDPPEIVLAKINSVNQSDVKYKETFNKLIKGKYIFSPDTPYITHSKDMEKLYSTILYKRAWDGTKAYGYTLDERYIPIVGAKHADFVNSELKYKETYEKLKGHYLAGKEISEFPNVVHCLDFQKMRSLLNYRRHYEDTKANVHIPQDMMNHVLAKRCQYILSDLEYRHYFHQWTSLPEEPNVVRVRHAQEILSDNVYKDDLNWLKGIGCYVWDTPQILHAKKSYDLQSQILYTAAGKENLKNYNLVTDTPLYVTALQSGINASEVKYKENYHQTKDKYTTVLETVDYDRIKNLKDLFSSNLYKEAWDKVKATSYILPPNTVSLTHAKNQKYMASHIKYREEYEKFKALYTLPRSVEDDPNTARCLRVGKFNIDRLYRSVYEKNKMKIHIVPDMVEMVTAKDSQKKVSEIDYRLHLHEWICHPDLQVNSHVRKVTDQISDIVYKDDLTWLKGIGCYVWDTPEILHAKHAYDLRNDIKYKAHVLKTRNNYKLVTDTPVYVQAVKSGKQLSDAVYHYDYVHSIRGRVAPTTKTVDLDRALHAYKLQSENLYRKAGLHALPTGYRLPVDTPHFKHTKDTRYMSSYFKYKEVYEHMKAYGYTLGPNDVPFVNVRRVNNITSERLYRQLYHKLKDKIHTTPDTPEIRQVKKTQEAVSELIYKSDFFKMQGHMISLPYTPQVLHCRYVGDITSDIKYKEDLQVLRGMGCFLYDTPDMVRSRHLRKLWSHYLYTDKARKMRDKYKVVLDTPEYRKVQELKTHLSELVYRAAGRKQKSIFTSVPDTPDLTRAKRGQKLQSQYLYVELATKERPHHHAGNQTTALKHARHVKDMVSENKYKIQYEKMKDKYTPVPDTPILIRAKRAYWNASDLRYKETFQKTKGKYHTVKDALDIVYHRTVTDHISKIKYKENYMSQLGIWRSIPDRPEHFHHRAVTDAVSDVKYKQDLTWLKGIGCYAYDTPDFTLAEKNKTLYSKYKYKEVFERTKSNFKYVADCPINRHFKFATQLMNEKKYRADYEQRKDKYHLVVDEPRHLLAKIAGDQISQIKYRKNYEETKDKFTSIVDTPEHLRTTKVNKQISDILYKLEYNKAKPRGYTTIHDTPMLLHVRKVKDEVSDLKYKEVYQRTKSNCTIEPDAVHIKAAKDAYKVNTNLDYKKKYEATKAYWKWTPDRPDFIQAAKSTLQQSDFEYKLDREYLKGCKLSVTDDKDMVLALKNSIIESDLKYKEKHVKERGSCHAVPDTPQILLAKTVSSLVSENKYKSYVKKHLAQGSYTTLPETRDTIHVKEVTKNVSDTNYKKKFVKEKGKSNYSIMLEPPDVKHAMDVAKKQSNVAYKKDAKENLHYTTVADRPDIKKATQAAKQASEVEYRAKHRKEGSHGLSMLGRPDIEMAKKAAKLSSQVQYRENFNKEKGKTPKYNPKDSQLYKVMKDANTLASEVKYKADLKKLHKPVTDMKESLIMNHVLNTSHLASSYQYKKNYEKSKGHYHTIPDNLEQLHLKEATELQSIVKYKEKYEKERGKPMLDFETPTYITAKESQQMQSGKEYRKDYEESIKGRNLTGLEVTPALLHVKYATKIASEKEYRKDLEESIRGKGLSEMEDTPDMLRAKNATQILNEKEYKRDLELEVKGRGLNAMANETPDFLRARNATDIASQIKYKQSAEMEKANFTSVVDTPEIIHAQQVKNLSSQKKYKEDAEKCMSYYETVLDTPEMQRVRENQKNFSLLQYQYDLKNSKGKITVVQDTPEILRVKENQKNFSSVLYKEDVSPGTAIGKTPEMMRVKQTQDHISSVKYKEVIGQGTPIPDLPEVKRVKQTQKHISSVMYKENLGTGIPTPVTPEIERVKRNQENFSSVLYKENLGKGTPTPITPEMERVKRNQENFSSILYKENLSKGTPLPVTPEMERVKRNQENFSSVLYKENVGKGTPTPVTPEMQRVKRNQENISSVLYKENLGKATPTPFTPEMERVKRNQENFSSVLYKENMRKATPTPVTPEMERAKRNQENISSVLYSDSFRKQIQGKAAYVLDTPEMRRVRETQRHISTVKYHEDFEKHKGCFTPVVTDPITERVKKNTQDFSDICYRGIQRKVVEMEQKRNDQDQETITGLRVWRTNPGSVFDYDPAEDNIQSRSLHMINAQAQRRSREQSRSASGLSISGGEEKSEHSEAAHLSTYSDGGVFFSAASTGYKHARTTELPQQRSSSVATQQTTVSSIPSHPSTAGKIFRAMYDYMAADADEVSFKDGDAIVNVQAIDEGWMYGTVQRTGRTGMLPANYVEAI

SEQ ID NO: 67 - protein, 499 aa, Bos taurus
MFNYERPKHFIQSQNPCGSRLQPPGPEISSYSSQTKQSSITIQPRQCTEQRYSASSTVSSHITMSSSAFPASPQQLAGSNPAQRVTATYNQSPASFLSSILPSQPDYSSSKNPSTVDSNYQQPSVGQPINVKSSQNANAKLTPKTPDHEIQGSKEALIQDLERKLKCKDSLLHNGNQRLTYEEKMARRLLGPQNAAAVFQGQNDSEAQDSAQQHNIEHARLQVPTSQVRSRSSSRGDVNDQDAIQEKFYPPRFIQVPENMSIEEGRFCRMDFKVSGLPAPDVSWYLNGRPVQSDDFHKMIVSEKGFHSLIFEVVRASDAGAYACVAKNRAGEATFTVQLDVLAKEHRRAPMFIYKPQSKKVFEGESVKLECQISAVPPPKLFWKRNNEMVQFNTDRISLYHDNSGRVTLLIKDVNKKDAGWYTVSAVNEAGVTTCNTRLDVTARPNQTLPAPKQLRVRPTFSKYLALNGKGLNVKQAFNPEGEFQRLAAQSGLYESEEL

SEQ ID NO: 68 - protein, 513 aa, Gallus gallus
MSVRNLPSVSSMCQPTMFNYERPKHFIQSKNVCQGQQQPPGSSTSTESSRQIKQSSILIQPRNPSGQKFSSSSSLSSSITLSSPSCSAPKESTYPVTPASAQSPASSSSGQRLISMPNQTPAAFLCSVLPSQPDYNSQTPPMEPHYSKPMYKKQASINSMQKTSDQEIRGTKEALIQDLEKKLRCKDNLLQNGNQRLTYEERMARRLLGPENAASVLEAQSEDMQNTQNAENVRLQVPTTHVRSRPSSRGDERGHDSIQEKFFQPRFTQVPEDVIIEEGRFCRLDFKVSGLPTPDVMWYQNGRMVHQDQFHKMIVSEKGFHSFIFEAVKSSDAGTYECVAVNRAGESSFAVKVEVIAKEHHTPPTFIFKPQSKKVFEGDTARLECQISAIPTPRIYWKRNNEMVQYNTDRISLLHDNTGRICLLIHNANKKDAGWYTVSAVNGAGVATCHARLEVATHTNKPVPAPKQLRVRPTFSKYLALNGRGLDVKQAFSPEGEFQRLAEQSGLYESDEL

SEQ ID NO: 69 - protein, 499 aa, Sus scrofa
MFNYERPKHFIQSQNPCGSRLQPPGPETSSYSSQTKQSSIIIQPRQCTEQRFSASSTVSSHITMSSSAFPASPQQPAASNPGQRVTATYNQSPASFLSSILPSQPDYSSSKIPSTMDSNYQQPSVGQPVNAKPSQSLNAKPIPRTPDHEIQGSKEALIQDLERKLKCKDSLLHNGNQRLTYEEKMARRLLGPQNAAAVFQAQNDSAAQDSPQQHNSEHARLQVPTSQVRSRSSSRGDVNDQDAIQEKFYPPRFIQVPENMSVEEGRFCRMDFKVSGLPAPDVSWYLNGRPVQSDDLHKMIVSEKGFHSLIFEVVRASDAGAYACVAKNRAGEATFTVQLDVLAKEHRRAPMFIYKPQSKKVFEGDSVKLECQISAIPPPKLFWKRNNEMVQFNTDRISLYHDNSGRVTLLIKDVNKKDAGWYTVSAVNEAGVITCNTRLDVTARPNQTLPAPKQLRVRPTFSKYLALNGRGLDVKQAFNPEGEFQRLAAQSGLYESEEL

SEQ ID NO: 70 - protein, 349 aa, Sus scrofa
MAHQTGIHATEELKEFFAKARAGSVRLIKVVIEDEQLVLGASRELMGCWDQDYDRAVLPLLDAQQPCYLLYRLDTQNAQGFEWLFLAWSPDNSPVRLKMLYAATRATVKKEFGGGHIKDELFGTVKDDLSFAGYQKHLSSCAAPAPLTSAERELQQIRINEVKTEISVESKHQTLQGLAFPLQPQAQRALQQLRQKMINYIQLKLDLERETIELVHTEPTDVAQLPSRVPRDAARYHFFLYKHTHEGDPLESVVFIYSMPGYKCSIKERMLYSSCKSRLLDSVEQDFQLEIAKKIEIGDGAELTAEFLYDEVHPKQHAFKQAFAKPKGPGGKRGHKRLIRGPGENGDDS

SEQ ID NO: 71 - protein, 3679 aa, Bos taurus
MLWWEEVEDCYEREDVQKKTFTKWINAQFSKFGKQHIENLFSDLQDGRRLLDLLEGLTGQKLPKEKGSTRVHALNNVNKALQVLQKNNVDLVNIGSSDIVDGNHKLTLGLIWNIILHWQVKNVMKNIMAGLQQTNSEKILLSWVRQSTRNYPQVNVINFTTSWSDGLALNALIHSHRPDLFDWNSVVRQQSATQRLEHAFNIAKYQLGIEKLLDPEDVATTYPDKKSILMYVTSLFQVLPQQVSLEAIQEVEMLPRPSKVTREEHFQLHHQMHYSQQITVSLAQGYERTPSSPQPRFKSYAYTQAAYVSTSDPTRSPFPSQRLEAPEDKSFGSPLMETEVNLDSYQTALEEVLSWLLSAEDTLQAQGEISNDVEEVKEQFHTHEGYMMDLTSHQGRVGNVLQLGSQLIGSGKLSEDEETEVQEQMNLLNSRWECLRVASMEKQSNLHKVLMDLQNQQLKELNAWLTKTEERTRKMEKEPLGPDLEDLKRQIQQHKVLQEDLEQEQVRVNSLTHMVVVVDESSGDHATAALEEQLKVLGDRWANICRWTEDRWVLLQDVLLKWQRFTEEQCLFSTWLSDKEDALNKIPTSGFKDQSEMLSSLQKLAVLKTDLEKKKQTMDKLCSLNHDLLSTLKNTLVAQKMEAWLDNFAQRWDNLVQKLEKSSTQISQAVTTTQPSLTQTTVMETVTMVTTREQILVKHAQEELPPPPPQKKRQIIVDSEIKKRLDVDITELHSWITRSEAVLQSPEFAVYRKEGNFSDLKEKVNAIEREKAEKFRKLQDASRSAQALVEQMVNEGVNADSIKQASEQLNSRWIEFCQLLSERLNWLEYQNNIITFYNQLQQLEQMTTTAENWLKTQPTTPSEPTAVKSQLKNCKDEVNRLSALQPQIERLKIQSIALKEKGQGPMFLDADFVAFTNHFNQVFADMQAREKELQTILDTLPTVRYQETMSTILTWIQQSETKLSIPQVTVTEYEIMEQRLEELQALQSSLQEHQNDLNYLSTTVKEMSRKAPSHISQRYQSEFENIEGRWKKLSAQLNERCQKLEEQMAKLRKLQNHIKTLKKWMAEVDVFLKDEWPALGDSEILKKQLKQCRLLVSDIQTIQPSLNSVNEGGQKIKTEAEPEFASRLETELRELNTQWDYICRQVYARKEALKGGLDKTVSLQKDLSEMHEWMTQAEEEYLERDFEYKTPDELQTAVEEMKRAKEEAQQKEAKVQLLTESVNSVIAQAPPAAQEALRKELDTLTTNYQWLCTRLNGKCKTLEEVWACWHELLSYLEKANKWLNEVELKLKTTENIPGGAEEISEVLSSLENLMQHSEDNPNQIRILAQTLTDGGVMDELINEELETFNSRWRELHEEAVRRQKLLEQSIQSAQEIEKSLQLIQESLSSIDKQLAAYIADKVDAAQMPQEAQKIQSDLTSHEISLEEMKKHYQGKETAQRVLSQIEVAQKKMQDVSMKFRLFQKPANFEQRLQESKMILDEVKMHLPALETKSVEQEVVQSQLNHCVNLYKSLSEVKSEVEMVIKTGRQIVQKKQTENPKELDERVTALKLHYNELGAKVTERKQQLEKCLKLSRKMRKEMNALTEWLAATDLELTKRSAVEGMPSNLDSEVAWGKATQKETEKQKVHLKSITELGEALKTVLGKKETLVEDKLSLLNSNWIAVTSRAEEWLNLLLEYQKHMETFDQNVDHITKWIIQADALLDESEKKKPQQKEDMLKRLKAELNDIRPKVDSTRDQAANLMANRGDHCRKVIEPKISELNHRFAAISHRIKTGKASIPLKELEQFNSDIQKLLEPLEAEIQQGVNLKEEDFNKDMSEDNEGTVKELLQRGDNLQQRITDERKREEIKIKQQLLQTKHNALKDLRSQRRKKALEISHQWYQYKRQADDLLKCLDDIEKKLASLPEPRDERKIKEIDRELQKKKEELNAVHRQAEGLSEDGAAMAVESTQIQLSKRWREIESKFAQFRRLNFAQIHTVHEESVMVMTEDMPLEISYVPSTYLTEITHVLQALSEVEQLLNAPDLCAKDFQDLFKQEESLKNIKDNLQQISGRIDVIHNKKAAALQSTTPPEKARLQEALSRLDFQWERVNKMYKDRQGQFDRSVEKWRRFHYDMKIFNQWLTEAEHFLKKTQIPENWEHAKYKWYLKELQDGIGQRQTVVRVLNATGEEIIQQSSKIDASILQEKLGSLNLRWQEVCKQLAERKKRLEEQKNILSEFQRDLNEFVLWLEEAGNISSIPLEPGNEQQLKEKLEEVKLLAEELPLRQGILKQLNETGGTVLVSAPISPEEQDKLENKLKQTNLQWIKVSRSLPEKQGEIEAHIKDLGQLEEQLNHLLLWLSPIRSQLEIYNQPNQTGPFDIKETEVAVQAKQPDVEGILSKGQNLYKEKPATEPVKRKLEDLSSEWKAVTHLLQELRAKWPGPVPGLTATGAPPSQTVALVTQPVVAKETAVSKLEMPSSLLLEVPALADFNRAWTELTDWLSLLDRVLKAQRVMVGDLEDINEMIIKQKATLQDLEQRRPQLEELITAAQNLKNKTSNQEARTIITDRIERIQSQWDEVQEHLQNRRQQLNEMLKDSTQWLEAKEEAEQVVGQARAKLETWKEGPYTMDAIQRKITETKQLAKDLRQWQINVDVANDLALKLLRDYSADDTRKVHMITENINASWASIHKRVSERETALEETHRLLQQFPLDLEKFLAWLTEAETTANVLQDATHKERLLEDSKGVRELMKQWQDLQGEIEAHTDIYHNLDENGQKILRSLEGSDDAVLLQRRLDNMNFKWSELRKKSLNIRSHLEASSDQWKRLHLSLQELLVWLQLKDDELSRQAPIGGDFPAVQKQNDIHRAFKRELKTKEPVIMSTLETVRIFLTEQPLEGLEKLYQEPRELPPEEKAQNVTRLLRKQAEEVNTEWEKLNLHSADWQRKIDEALERLQELQEATDELDLKLRQAEVIKGSWQPVGDLLIDSLQDHLEKVKALRGEIAPLKENVSHVSDLARQLTTLGIQLSPYNLSTLEDLNTRWKLLQVAVEDRIRQLHEAHRDFGPASQHFLSTSVQGPWERAISPNKVPYYINHETQTTCWDHPKMTELYQSLADLNNVRFSAYRTAMKLRRLQKALCLDLLSLSAACDALDQHNLKQNDQPMDILQIINCLTTIYDRLEQEHNNLVNVPLCVDMCLNWLLNVYDTGRTGRIRVLSFKTGIISLCKAHLEDKYRYLFKQVASSTGFCDQRRLGLLLHDSIQIPRQLGEVASFGGSNIEPSVRSCFQFANNKPEIEAALFLDWMRLEPQSMVWLPVLHRVAAAETAKHQAKCNICKECPIIGFRYRSLKHFNYDICQSCFFSGRVAKGHKMHYPMVEYCTPTTSGEDVRDFAKVLKNKFRTKRYFAKHPRMGYLPVQTVLEGDNMETPVTLINFWPVDSAPASSPQLSHDDTHSRIEHYASRLAEMENSSGSYLNDSISPNESIDDEHLLIQHYCQSLNQDSPLSQPRSPAQILISLESEERGELERILADLEEENRNLQAEYDRLKEQHEHKGLSPLPSPPEMMPTSPQSPRDAELIAEAKLLRQHKGRLEARMQILEDHNKQLESQLHRLRQLLEQPQAEAKVNGTTVSSPSTSLQRSDSSQPMLLRVVGSQTSESMGEEDLLSPPQDSSTGLEEVMEQLNNSFPSSRGRNTPGKPMREDTM

SEQ ID NO: 72 - protein, 395 aa, Bos taurus
MSAADRMGARAVPGLRLALLLLMVLGTPKSGVQGEEGLDFPEYDGVDRVVNVNAKNYKNVFKKYEVLALLYHEPPEDDKASQRQFEMDELILELAAQVLEDKGVGFGMVDSEKDAAVAKKLGLTEEDSVYVFKGDEVIEYDGEFSADTLVEFLLDVLEDPVELIEGERELQAFENIEDDNKLIGYFKNKDSEHYKAYEDAAEEFHPYIPFFATFDSKVAKKLTLKLNEIDFYEAFMEEPVTIPDKPNSEEEIVSFVEAHKRSTLRKLKPESMYETWEDDLDGIHIVAFAEETDPDGYEFLETLKAVAQDNTDNPDLSIIWIDPDDFPLLVPYWEKTFNIDLSAPQIGVVNVTDADSVWMEMDDEEDLPSAEELEDWLEDVLEGEINTEDDDEEDD

SEQ ID NO: 73 - protein, 377 aa, Gallus gallus
MCDDEETTALVCDNGSGLVKAGFAGDDAPRAVFPSIVGRPRHQGVMVGMGQKDSYVGDEAQSKRGILTLKYPIEHGIITNWDDMEKIWHHTFYNELRVAPEEHPTLLTEAPLNPKANREKMTQIMFETFNVPAMYVAIQAVLSLYASGRTTGIVLDSGDGVTHNVPIYEGYALPHAIMRLDLAGRDLTDYLMKILTERGYSFVTTAEREIVRDIKEKLCYVALDFENEMATAASSSSLEKSYELPDGQVITIGNERFRCPETLFQPSFIGMESAGIHETTYNSIMKCDIDIRKDLYANNVLSGGTTMYPGIADRMQKEITALAPSTMKIKIIAPPERKYSVWIGGSILASLSTFQQMWISKQEYDEAGPSIVHRKCF

SEQ ID NO: 74 - protein, 1937 aa, Gallus gallus
MMDMTEFGEAAPFLRKSEKELMMLQTVAFDGKKKCWVPDDKKAYVEAEITESSGGKVTVETTDGRTMTIKEDDVQSMNPPKFDMIEDMAMLTHLNEASVLYNLRKRYSNWMIYTYSGLFCVTINPYKWLPVYKSEVVAAYKGKRRSEAPPHIFSIADNAYHDMLRNRENQSMLITGESGAGKTVNTKRVIQYFATVAALGEPGKKSQPATKTGGTLEDQIIQANPALEAFGNAKTLRNDNSSRFGKFIRIHFGTTGKLSSADIEIYLLEKSRVIFQQPGERDYHIFYQILSGKKPELLDMLLVSTNPYDYHFCSQGVVTVDNLDDGEELMATDQAMDILGFVPDEKYGAYKLTGAIMHFGNMKFKQRPREEQAEADGTESADKAAYLMGINSSDLVKGLLHPRVKVGNEYVTKGQSVEQVLYAVGALSKAVYDRMFKWLVVRINKTLDTKLPRQFFIGVLDIAGFEIFDFNSFEQLCINYTNEKLQQFFNHHMFVLEQEEYKKEGIEWVFIDFGMDLQACIDLIEKPLGILSILEEECMFPKATDMTFKAKLYDNHLGKSPNLQKPRPDKKRKYEAHFELIHYAGSVPYNIIGWLEKNKDPLNETVVGIFQKSSNKLLASLFESYVGADSADQGGEKKRKKGASFQTVSSLHKENLNKLMTNLRSTAPHFVRCIIPNESKTPGEMDAFLVLHQLRCNGVLEGIRICRKGFPNRVLYADFKQRYRILNPGAIPEDKFVDSRKAAEKLLASLDIDHNQYRFGHTKVFFKAGLLGHLEEMRDERLAKILTMIQARARGRLMRIEFQKIVERRDALLVIQWNIRAFMAVKNWPWMKLFFKIKPLLKSAETEKEMANMKEEFLKLKEALEKSEARRKELEEKQVSLVQEKNDLLLQLQAEQDTLADAEERCDLLIKSKIQLEAKVKELTERVEDEEEMNSELTSKKRKLEDECSELKKDIDDLEITLAKVEKEKHATENKVKNLTEEMATLDENISKLTKEKKSLQEAHQQVLDDLQAEEDKVNTLSKAKVKLEQQVDDLEGSLEQEKKVRMDLERAKRKLEGDLKLTQESVMDLENDKLQMEEKLKKKEFEMSQLNSKIEDEQAIVMQLQKKIKELQARIEELEEELEAERAARAKVEKQRSDLARELEVLSERLEEAGGATAAQLEMNKKREAEFLKLARDLEEATLHYEATAAALRKKHADSVAEMGEQLDNLQRVKQKLEKEKSELKMEVDDLTSNMEQTVKGKANAEKLCRTYEDHLNETKTKLDEMTRLMNDLTTQKTKLQSENGEFVRQLEEKESLISQLSRGKTSFTQQIEELRRQLEEETKSKNALAHALQAARHDCDLLREQYEEEQEAKAELQRALSKGNAEVAQWRTKYETDAIQRTEELEDAKKKLAARLQEAEEAIEAANAKCSSLEKTKHRLQNELEDMMIDLEKANSAAASLDKKQRGFDKIINDWKQKYEESQAELEASQKEARSLSTELFKLKNAYEETLDHLETLKRENKNLQEEISDLTNQISEGNKNLHEIEKVKKQVEQEKSEVQLALEEAEGALEHEESKTLRFQLELSQLKADFERKLAEKDEEMENIRRNQQRTIDSLQSTLDSEARSRNEAIRLKKKMEGDLNEMEIQLSHANRHAAEATKSARGLQTQIKELQVQLDDLGHLNEDLKEQLAVSDRRNNLLQSELDELRALLDQTERARKLAEHELLEATERVNLLHTQNTSLINQKKKLEGDISQMQNEVEESIQECRNAEEKAKKAITDAAMMAEELKKEQDTSAHLERMKKNMEQTIKDLQKRLDEAEQIALKGGKKQIQKLESRVRELENELENELRRNSDAQKGARKFERRIKEVTYQSEEDKKNLARMQDLIDKLQLKVKSYKHQAEEAEAQANLYLSKYRKQQHDLDDAEERAEIAESQVNKLRSKSRDIGMKKVHEEE

SEQ ID NO: 75 - protein, 1272 aa, Gallus gallus
MPEPAKKAVSAFTKKPKTTEVAAGSTAVFEAETEKTGIKVKWQRAGTEITDSEKYAIKAEGNKHSLTISNVGKDDEVTYAVIAGTSKVKFELKVKEPEKSEPVAPAEASPAPAASELPAPPVESNQNPEVPPAETQPEEPVDPIGLFVTRPQDGEVTVGGNITFTAKVAGESLLKKPSVKWFKGKWMDLASKVGKHLQLHDNYDRNNKVYTFEMEIIEANMTFAGGYRCEVSTKDKFDSSNFNLIVNEAPVSGEMDIRAAFRRTSLAGGGRRMTSAFLSTEGLEESGELNFSALLKKRDSFLRTANRGDGKSDSQPDVDVWEILRKAPPSEYEKIAFQYGITDLRGMLKRLKRIKKEEKKSTAFLKKLDPAYQVDKGQKIKLMVEVANPDADVKWLKNGQEIQVSGSKYIFEAIGNKRILTINHCSLADDAAYECVVAEEKSFTELFVKEPPILITHPLEDQMVMVGERVEFECEVSEEGATVKWEKDGVELTREETFKYRFKKDGKKQYLIINESTKEDSGHYTVKTNGGVSVAELIVQEKKLEVYQSIADLTVKARDQAVFKCEVSDENVKGIWLKNGKEVVPDERIKISHIGRIHKLTIEDVTPGDEADYSFIPQGFAYNLSAKLQFLEVKIDFVPREEPPKIHLDCLGQSPDTIVVVAGNKLRLDVPISGDPTPTVIWQKVNKKGELVHQSNEDSLTPSENSSDLSTDSKLLFESEGRVRVEKHEDHCVFIIEGAEKEDEGVYRVIVKNPVGEDKADITVKVIDVPDPPEAPKISNIGEDYCTVQWQPPTYDGGQPVLGYILERKKKKSYRWMRLNFDLLKELTYEAKRMIEGVVYEMRIYAVNSIGMSRPSPASQPFMPIAPPSEPTHFTVEDVSDTTVALKWRPPERIGAGGLDGYIVEYCKDGSAEWTPALPGLTERTSALIKDLVTGDKLYFRVKAINLAGESGAAIIKEPVTVQEIMQRPKICVPRHLRQTLVKKVGETINIMIPFQGKPRPKISWMKDGQTLDSKDVGIRNSSTDTILFIRKAELHHSGAYEVTLQIENMTDTVAITIQIIDKPGPPQNIKLADVWGFNVALEWTPPQDDGNAQILGYTVQKADKKTMEWYTVYDHYRRTNCVVSDLIMGNEYFFRVFSENLCGLSETAATTKNPAYIQKTGTTYKPPSYKEHDFSEPPKFTHPLVNRSVIAGYNTTLSCAVRGIPKPKIFWYKNKVDLSGDAKYRMFSKQGVLTLEIRKPTPLDGGFYTCKAVNERGEAEIECRLDVRVPQ

SEQ ID NO: 76 - protein, 1271 aa, Gallus gallus
MPEPAKKAVSAFTKKPKTTEVAAGSTAVFEAETEKTGIKVKWQRAGTEITDSEKYAIKAEGNKHSLTISNVGKDDEVTYAVIAGTSKVKFELKVKEPEKSEPVAPAEASAPAASELPAPPVESNQNPEVPPAETQPEEPVDPIGLFVTRPQDGEVTVGGNITFTAKVAGESLLKKPSVKWFKGKWMDLASKVGKHLQLHDNYDRNNKVYTFEMEIIEANMTFAGGYRCEVSTKDKFDSSNFNLIVNEAPVSGEMDIRAAFRRTSLAGGGRRMTSAFLSTEGLEESGELNFSALLKKSSSFLRTANRGDGKSDSQPDVDVWEILRKAPPSEYEKIAFQYGITDLRGMLKRLKRIKKEEKKSTAFLKKLDPAYQVDKGQKIKLMVEVANPDADVKWLKNGQEIQVSGSRYIFEAIGNKRILTINHCSLADDAAYECVVAEEKSFTELFVKEPPILITHPLEDQMVMVGERVEFECEVSEEGATVKWEKDGVELTREETFKYRFKKDGKKQYLIINESTKEDSGHYTVKTNGGVSVAELIVQEKKLEVYQSIADLTVKARDQAVFKCEVSDENVKGIWLKNGKEVVPDERIKISHIGRIHKLTIEDVTPGDEADYSFIPQGFAYNLSAKLQFLEVKIDFVPREEPPKIHLDCLGQSPDTIVVVAGNKLRLDVPISGDPTPTVIWQKVNKKGELVHQSNEDSLTPSENSSDLSTDSKLLFESEGRVRVEKHEDHCVFIIEGAEKEDEGVYRVIVKNPVGEDKADITVKVIDVPDPPEAPKISNIGEDYCTVQWQPPTYDGGQPVLGYILERKKKKSYRWMRLNFDLLKELTYEAKRMIEGVVYEMRIYAVNSIGMSRPSPASQPFMPIAPPSEPTHFTVEDVSDTTVALKWRPPERIGAGGLDGYIVEYCKDGSAEWTPALPGLTERTSALIKDLVTGDKLYFRVKAINLAGESGAAIIKEPVTVQEIMQRPKIWLPRHLRQTLVKKVGETINIMIPFQGKPRPKISWMKDGQTLDSKDVGIRNSSTDTILFIRKAELHHSGAYEVTLQIENMTDTVAITIQIIDKPGPPQNIKLADVWGFNVALEWTPPQDDGNAQILGYTVQKADKKTMEWYTVYDHYRRTNCVVSDLIMGNEYFFRVFSENLCGLSETAATTKNPAYIQKTGTTYKPPSYKEHDFSEPPKFTHPLVNRSVIAGYNTTLSCAVRGIPKPKIFWYKNKVDLSGDAKYRMFSKQGVLTLEIRKPTPFDGGFYTCKAVNERGEAEIECRLDVRVPQ

SEQ ID NO: 77 - protein, 208 aa, Gallus gallus
MAEEEEPKPPPLRRKSSANYRGYAVEPHAKRQSKISASRKLQLKTLLLQRAKRELEREEQERAGEKQRHLGELCPPPELEGLGVAQLQELCRELHARIGRVDEERYDMGTRVSKNMAEMEELRRRVAGGRFVRPALRRVRLSADAMMAALLGSKHRVGTDLRAGLRQVRKDDAEKESREVGDWRKNVDALSGMEGRKKKFEAPGGGQG

SEQ ID NO: 78 - protein, 219 aa, Gallus gallus
MKQKHQEKGESKPKPKPFMPNLVPPKIPDGERLDFDDIHRKRMEKDLNELQALIEAHFESRKKEEEELISLKDRIEQRRAERAEQQRIRSEREKERQARMAEERARKEEEEARKKAEEEARKKKAFSNMLHFGGYMQKSEKKGGKKQTEREKKKKILSERRKPLNIDHLSEDKLRDKAKELWQTIRDLEAEKFDLQEKFKRQKYEINVLRNRVSDHQKV

SEQ ID NO: 79 - protein, 197 aa, Sus scrofa
MPPKKPEPKKEAAKAAPAPAPAPAPAPAPPPEPAKEPTFDPKSIKIDFTADQIEEFKEAFSLFDRTPTGEMKITYGQCGDVLRALGQNPTNAEVLRVLGKPKPEEMNAKMLDFETFLPILQHISRNKEQGTYEDFVEGLRVFDKESNGTVMGAELRHVLATLGEKMTEAEVEQLLAGQEDANGCINYEAFVKHIMSG

SEQ ID NO: 80 - protein, 1931 aa, Gallus gallus
MEALLGAAAPFLRAPEGPRPTPAGDTRGLCFVPHPQLEFIRARVTARAGNGVTVTTEMGETLTVPEADVHPQNPPKFDRIEDMAMLTFLHEPAVLYNLKERYASWMIYTYSGLFCVTVNPYKWLPVYNAEVVAAYRGKKRTEVPPHIFSISDNAYQNMLTDRENQSILITGESGAGKTVNTKRVIQYFASIAAIGHRKKEVANSSKGTLEDQIIQANPALEAFGNAKTVRNDNSSRFGKFIRIHFGATGKLASADIETYLLEKSRVIFQLKAERNYHIFYQILSNKKPELLEMLLITNNPYDYSYVSQGEVTVASIDDSEELLATDSAFDVLGFTAEEKAGVYKLTGAIMHFGNMKFKQKQREEQAEPDGTEDCDKSAYLMGLNSADLLKGLCHPRVKVGNEYVTKGQSVQQVYYSIGALAKAVYEKMFNWMVVRINNSLETKQPRQYFIGVLDIAGFEIFDFNSFEQLCINFTNEKLQQFFNHHMFVLEQEEYKKEGIEWEFIDFGMDLQACIDLIEKPMGIMSILEEECMFPKASDMTFKAKLFDNHLGKSANFGKPRNVKGKSEAHFSLIHYAGTVDYNIIGWLEKNKDPLNETVVGLYQKSALKLLASLFSNYAGADAGGDGGKGKGAKKKGSSFQTVSALHRENLNKLMANLKTTHPHFVRCLIPNERKEPGVMDNPLVMHQLRCNGVLEGIRICRKGFPNRILYGDFRQRYRIPNPTAIPEGQFIDSRKGAEKLLGSLDIDHNQYKFGHTKVFFKAGLLGLLEEMRDERLSLIITRIQAQARGQLMRIEFKKILERRDALLVIQWNIRAFMGVKNWPWMKLYFKIKPLLKSAETEKEMQTMKEEFGHLKEALEKSAARRKELEEKMVSMLQEKNDLQLQVQAEQDNLADAEERCDQLIKNKIQLEAKVKEMTERLEEEEEMNAELAAKKRKLEDECSELKKDIDDLELSLAKVEKEKHATENKVKNLTEEMAGLDENITKLTKEKKILQESHQQALDDLQAEEDKVNTLAKAKGKLEQQVDDLESSLEQEKKIRMDLERAKRKLEGDLKLAQESIMDLENDKQQLEERLKKKDFELNTLNARIEDEQAISAQLQKKLKELQARIEELEEELEAERTGRAKVEKLRSELLQELEETSERLEEAGGATSVQLELNKKREAEFQKLRRDLEEATLQHEATAATLRKKHADSVAELSEQLDNLQRVKQKLEKEKSELKLELDDVNSNTEQLIKAKTNLEKMCRTTEDQMNEHRSKLEEAQRTVTDLSTQRAKLQTENSELSRQLEEKEAFINQLTRGKLTYTQQLEDLKRQLEEEAKAKNALAHALQSAQHDCDLLREQYEEEMEAKAELQRALSKANSEVAQWRTKYETDAIQRTEELEEAKKKLAQRLQEAEEAVEAVNAKCSSLEKTKHRLQNEIEDLMADVERSNAAAAALDKKQRNFDKILSEWKQKFEESQTELEASQKEARSLSTELFKLKNAYEESLEHLETFKRENKNLQEEILDLTEQLGASQKSIHELEKVRKQLDAEKLELQAALEEAEASLEHEEGKILRAQLEFNQVKADYERKLAEKDEEIEQSKRNHLRVVDSLQTSLDAETRSRNEALRLKKKMEGDLNEMEIQLSHANRTAAEAQKQVKALQGYLKDTQLQLDDVVRANEDLKENIAIVERRNNLLQSELEELRAMVEQSERARKLAEQELIEASERVQLLHSQNTSLINQKKKMEADISQLQTEVEEAIQECRNAEEKAKKAITDAAMMAEELKKEQDTSAHLERMKKNMEQTVKDLQLRLDEAEQLALKGGKKQLQKLEVRVRELENELEAEQKRNAESIKGLRKSERRVKELSYQTEEDRKNMVRLQDLVDKLQLKVKAYKRQAEEAEEQANSNLAKFRKVQHELDEAEERADMAESQVNKLRARSRDIGAKKGLNEE

SEQ ID NO: 81 - protein, 1941 aa, Gallus gallus
MSMLDMSEFGEAAEYLRKSYTEQLKLQTIPFDGKKRAWIPDEKEAYIEVEIKESTGGKVTVETKDKQTRVVKEDELQAMNPPKFDMIEDMAMLTHLNEASVLYNLKRRYSHWMIYTYSGLFCVTINPYKWLPVYTAPVVAAYKGKRRSEAPPHIYSIADNAYNDMLRNRENQSMLITGESGAGKTVNTKRVIQYFAIVAALGDTPGKKVAALATKTGGTLEDQIIEANPAMEAFGNAKTIRNDNSSRFGKFIRIHFGPSGKLASADIDIYLLEKSRVIFQQPKERSYHIYYQILSGKKPELQDMLLLSLNPYDYHFCSQGVTTVDNLDDGEELMATDHAMDILGFSNDEKYGSYKIVGAIMHFGNMKFKQKQREEQAEADGTESADKAAYLMGISSADLIKGLLHPRVKVGNEYVTKGQNVEQVVYAVGALAKATYDRMFKWLVTRINKTLDTKLARQFFIGVLDIAGFEIFDFNSFEQLCINFTNEKLQQFFNHHMFVLEQEEYKKEGIEWVFIDFGLDLQACIDLIEKPLGILSILEEECMFPKASDMSFKAKLYDNHLGKSPNFQKPRPDKKRKYEAHFELVHYAGVVPYNIIGWLDKNKDPLNETVVAVFQKSQNKLLASLYENYVGSSSEEPHKPGSKEKRKKAASFQTVSQLHKENLNKLMTNLRSTQPHFVRCIIPNETKTPGAMDAFLVLHQLRCNGVLEGIRICRKGFPNRILYADFKQRYRILNPAAIPDDKFVDSRKATEKLLSSLELDHSQYKFGHTKVFFKAGLLGMLEEMRDERLAKILTMLQARIRGHLMRIEYQKIISRREALYTIQWNIRAFNAVKNWSWMKLFFKIKPLLKSAQTEKEMSTLKEEFQKLKEALEKSEAKRKELEEKQVSMIQEKNDLALQLQAEQDNLADAEERCDLLIKSKIQLEAKVKELTERVEDEEEMNADLTAKKRKLEDECAELKKDIDDLEITLAKVEKEKHATENKVKNLIEEMAALDEIIAKLTKEKKALQEAHQQALDDLQAEEDKVNTLTKAKVKLEQQVDDLESSLEQEKKIRMDLERAKRKLEGDLKLTQESVMDLENDKQQLEEKLKKKDFEMSQLNSRIEDQQVTEAQLQKKIKELQARIEELEEELEAERAARAKVEKQRAEVSRELEELSERLEEAGGATSAQLEMNKKREVEFLKLRRDLEEATLQHESTAAALRKKHADSVAELSEQIDNLQRVKQKLEKEKSEMKMEVDDLSSNIEYLTKNKANAEKLCRTYEDQLSEAKSKVDELQRQLTDVSTQRGRLQTENGELSRLLEEKESFINQLSRGKTSFTQTIEELKRQLEEETKSKNALAHALQASRHDCDLLREQYEEEVEAKSELQRNLSKANAEVAQWRTKYETDAIQRTEELEEAKKKLAIRLQEAEEAVEAAHAKCSSLEKTKHRLQTEIEDLSVDLERANSACAALDKKQRNFDRILAEWKQKYEETQAELEASQKESRSLSTELFKLKNAYEESLDNLETLKRENKNLQEEIADLTDQISMSGKTIHELEKLKKALENEKSDIQAALEEAEGALEHEESKTLRIQLELNQIKADVDRKLAEKDEEFENLRRNHQRAMDSMQATLDAEARAKNEAVRLRKKMEGDLNEMEIQLSHANRQAAEFQKLGRQLQAQIKDLQIELDDTQRQNDDLKEQAAALERRNNLLLAEVEELRAALEQAERSRKLAEQELLEATERVNLLHSQNTGLINQKKKLETDISQLSSEVEDAVQECRNAEEKAKKAITDAAMMAEELKKEQDTSAHLERMKKNMEQTIKDLQMRLDEAEQIALKGGKKQIQKLEARVRELEGELDMEQKKMAEAQKGIRKYERRIKELSYQTEEDRKNLTRMQDLIDKLQSKVKSYKRQFEEAEQQANSNLVKYRKVQHELDDAEERADIAETQVNKLRARTKEVITFKHE

SEQ ID NO: 82 - protein, 1935 aa, Sus scrofa
MVDAEMAAFGEAAPYLRKSEKERLEAQTRPFDLKKDVYVPDDKEEFVKAKILSREGGKVTAETEHGKTVTVKEDQVLQQNPPKFDKIEDMAMLTFLHEPAVLYNLKERYASWMIYTYSGLFCVTINPYKWLPVYNAEVVAAYRGKKRSEAPPHIFSISDNAYQYMLTDRENQSILITGESGAGKTVNTKRVIQYFAVIAAIGDRSKKEQTPGKGTLEDQIIQANPALEAFGNAKTVRNDNSSRFGKFIRIHFGATGKLASADIETYLLEKSRVIFQLKAERDYHIFYQILSNKKPELLDMLLITNNPYDYAFISQGETTVASIDDAEELMATDNAFDVLGFTSEEKNSMYKLTGAIMHFGNMKFKLKQREEQAEPDGTEEADKSAYLMGLNSADLLKGLCHPRVKVGNEYVTKGQNVQQVMYATGALAKAVYEKMFNWMVTRINTTLETKQPRQYFIGVLDIAGFEIFDFNSFEQLCINFTNEKLQQFFNHHMFVLEQEEYKKEGIEWEFIDFGMDLQACIDLIEKPMGIMSILEEECMFPKATDMTFKAKLYDNHLGKSNNFQKPRNIKGRPEAHFALIHYAGTVDYNIIGWLQKNKDPLNETVVDLYKKSSLKLLSNLFANYAGADTPVEKGKGKAKKGSSFQTVSALHRENLNKLMTNLRSTHPHFVRCIIPNETKSPGVIDNPLVMHQLRCNGVLEGIRICRKGFPNRILYGDFRQRYRILNPAAIPEGQFIDSRKGAEKLLGSLDIDHNQYKFGHTKVFFKAGLLGLLEEMRDERLSRIITRIQAQSRGVLSRMEFKKLLERRDSLLIIQWNIRAFMSVKNWPWMKLYFKIKPLLKSAETEKEMATMKEEFGRLKEALEKSEARRKELEEKMVSLLQEKNDLQLQVQAEQDNLADAEERCDQLIKNKIQLEAKVKEMTERLEDEEEMNAELTAKKRKLEDECSELKRDIDDLELTLAKVEKEKHATENKVKNLTEEMAGLDEIIAKLTKEKKALQEAHQQALDDLQAEEDKVNTLTKAKVKLEQHVDDLEGSLEQEKKVRMDLERAKRKLEGDLKLTQESIMDLENDKQQLDERLKKKDFELNALNARIEDEQALGSQLQKKLKELQARIEELEEELEAERTARAKVEKLRSDLSRELEEISERLEEAGGATSVQIEMNKKREAEFQKMRRDLEEATLQHEATAAALRKKHADSVAELGEQIDNLQRVKQKLEKEKSEFKLELDDVTSNMEQIIKAKANLEKMCRTLEDQMNEHRSKAEETQRSVNDLTSQRAKLQTENGELSRQLDEKEALISQLTRGKLTYTQQLEDLKRQLEEEVKAKNALAHALQSARHDCDLLREQYEEETEAKAELQRVLSKANSEVAQWRTKYETDAIQRTEELEEAKKKLAQRLQDAEEAVEAVNAKCSSLEKTKHRLQNEIEDLMVDVERSNAAAAALDKKQRNFDKILAEWKQKYEESQSELESSQKEARSLSTELFKLKNAYEESLEHLETFKRENKNLQEEISDLTEQLGSSGKTIHELEKVRKQLEAEKLELQSALEEAEASLEHEEGKILRAQLEFNQIKAEMERKLAEKDEEMEQAKRNHLRVVDSLQTSLDAETRSRNEALRVKKKMEGDLNEMEIQLSHANRMAAEAQKQVKSLQSLLKDTQIQLDDAVRANDDLKENIAIVERRNNLLQAELEELRAVVEQTERSRKLAEQELIETSERVQLLHSQNTSLINQKKKMEADLSQLQTEVEEAVQECRNAEEKAKKAITDAAMMAEELKKEQDTSAHLERMKKNMEQTIKDLQHRLDEAEQIALKGGKKQLQKLEARVRELENELEAEQKRNAESVKGMRKSERRIKELTYQTEEDRKNLLRLQDLVDKLQLKVKAYKRQAEEAEEQANTNLSKFRKVQHELDEAEERADIAESQVNKLRAKSRDIGTKGLNEE

SEQ ID NO: 83 - protein, 354 aa, Bos taurus
MEAATAPEAALRPTLKVKEASPADADGPQASPRRGTGSPLSQLLPPIEEHPKIWLPRALRQTYIRKVGDTVNLLIPFQGKPKPQAIWTRDGCALDTSRVSVRNGERDSILFIREAQRADSGRYQLSVQLGGLEATATIDILVIERPGPPQSIKLVDVWGSSATLEWTPPQDTGNAALLGYTVQKADTKSGLWFTVLERCRRASCTVPNLIVGNSYTFRVFAENQCGLSENAPITADLAHIQKAATVYRTEGFAQRDFSEAPKFTQPLADCTTVIGYDTQLFCCVRASPKPKIIWLKNKMDIQGNPKYRALTHLGICSLEIRKPGPFDGGIYTCKAVNPLGEASVDCRVDVKAPN

SEQ ID NO: 84 - protein, 471 aa, Sus scrofa
MSQAYSSSQRVSSYRRTFGGAPSFPLGSPLSSPVFPRAGFGTKGSSSSVTSRVYQVSRTSGGAGGLGPLRASRLGATRVPSSSYGAGELLDFSLADAVNQEFLTTRTNEKVELQELNDRFANYIEKVRFLEQQNAALAAEVNRLKGREPTRVAEIYEEELRELRRQVEVLTNQRARVDVERDNLLDDLQRLKAKLQEEIQLKEEAENNLAAFRADVDAATLARIDLERRIESLNEEIAFLKKVHEEEIRELQAQLQEQQVQVEMDMSKPDLTAALRDIRAQYETIAAKNISEAEEWYKSKVSDLTQAANKNNDALRQAKQEMMEYRHQIQSYTCEIDALKGTNDSLMRQMRELEDRFASEASGYQDNIARLEEEIRHLKDEMARHLREYQDLLNVKMALDVEIATYRKLLEGEESRINLPIQTFSALNFRETSPEQRGSEVHTKKTVMIKTIETRDGEVVSEATQQQHEVL

SEQ ID NO: 85 - protein, 566 aa, Sus scrofa
MSEHSRNSDQEEPFDREIDEDEILANLSPEELKELQSEMDVMAPDPRLPVGMIQKDQTDKPPTGNFDHKSLVDYMYWQKASRRMLEDERVPVTFVPSEEKPQEQRKEIDKGNKNMSQYLKEKLNNEIAAHKRESKSSDNEQETNDDDEDNEDDEDDEEDDAEDEEDEGDESDEKTKGEEEGEVKEPIRNGESNCQQVPNKAFEEQKDRPEAQEKFEKKISKLDPKKLALDTSFLKVSARPSGNQTDLDGSLRRVRQNDPDMKELNLNNIENIPKEMLLDFVNAMKKNKHIKTFSLANVGADESVAFALANMLRENRSITTLNIESNFITGKGIVAIMRCLQFNETLTELRFHNQRHMLGHHAEMEISRLLKANTTLLKMGYHFELPGPRMVVTNLLTRNQDKQRQKRQEEQKQQQLKEQKKLIAMLENGLGLPPGMWEMLGGPMPDSQMQEFLQPPPPKSLHPQTAPFSRRNEVMAKPAQPPKYRTDPDSFRVVKLKRIQRKSRMPEAREPPEKTNLKDVIKTLKPVPRNRPPPLVEITPRDQLLNDIRHSNIAYLKPVQLPKELA

SEQ ID NO: 86 - protein, 284 aa, Bos taurus
MDAIKKKMQMLKLDKENALDRAEQAEADKKAAEDRSKQLEDELVSLQKKLKATEDELDKYSEALKDAQEKLELAEKKATDAEADVASLNRRIQLVEEELDRAQERLATALQKLEEAEKAADESERGMKVIESRAQKDEEKMEIQEIQLKEAKHIAEDADRKYEEVARKLVIIESDLERAEERAELSEGKCAELEEELKTVTNNLKSLEAQAEKYSQKEDKYEEEIKVLSDKLKEAETRAEFAERSVTKLEKSIDDLEDELYAQKLKYKAISEELDHALNDMTSI

SEQ ID NO: 87 - protein, 284 aa, Gallus gallus
MEAIKKKMQMLKLDKENAIDRAEQAETDKKAAEDKCKQVEDELVALQKKLKGTEDELDKYSEALKDAQEKLEQAEKKATDAEGEVAALNRRIQLVEEELDRAQERLATALQKLEEAEKAADESERGMKVIENRAMKDEEKMEIQEMQLKEAKHIAEEADRKYEEVARKLVILEGELERAEERAEVSEVKCSDLEEELKNVTNNLKSLEAQSEKYSEKEDKYEEEIKILSDKLKEAETRAEFAERTVAKLEKSIDDLEDELYAQKLKYKAISEELDHALNDMTSL

SEQ ID NO: 88 - protein, 332 aa, Gallus gallus
MEAIKKKMQMLKLDKENALDRAEQAEAEQKQAEERSKQLEDELAAMQKKLKGTEDELDKYSEALKDAQEKLELAEKKAADAEAEVASLNRRIQLVEEELDRAQERLATALQKLEEAEKAADESERGMKVIENRALKDEEKMELQEIQLKEAKHIAEEADRKYEEVARKLVIIEGDLERTEERAELAESKCSELEEELKNVTNNLKSLEAQAEKYSQKEDKYEEEIKILTDKLKEAETRAEFAERSVAKLEKTIDDLEDELYAQKLKYKAISEELDHALNDMTSMARRALQESSFGEMGHLPWFPEPQRVYPVSGRVDFFSGMGGLTYGLKRT

SEQ ID NO: 89 - protein, 552 aa, Gallus gallus
MSTFGYRRELSKYEDIDEDELLASLTEEELKELERELEDIEPDRNLPVGQRQKSLTEKTPTGTFSREALMAYWERETRKLLEKERLGACEKDSEQEEDNSEDIQEECFTESNSEVSEEAYTEEDDEEEEEEEEEEEDEDDSDDEDEEKQNSAASERPVNCEDGRSSSHVRHKKCSNAKNSENLFNGHDGKDTENLSFKSSAIHPCGNPTVIEDALEKVRSNDPETTEVNLNNIENITSQMLIQFSQALRDNTVVKSFSLANTHADDNVAIAIAGMLKVNQHITSLNIESNFITGKGVLAIMRALQHNKVLTELRFHNQRHIMGSQVEMDIVKLLKENTTLVKLGYHFDLAGPRMSMTSILTRNMDKQRQKRMQEQRQQEYGCDGAINPKTKVLQKGTPRSSPYTSPKSSPWSSPKLPRKSAPAKSQPPAPAPPPPPPPPPPPPPPPPPVIPDKKAPTRNIAEVIKQQESSRKALQNGQKKKKGKKGKKHENSILKEIKDSLKSVSDRKSEEGSRPSTRPSTPQRSLHDNLMEAIRASSIKQLRRVEVPEALR

SEQ ID NO: 90 - protein, 365 aa, Sus scrofa
MPQNVILPGPAPWGFRLSGGIDFNQPLIITRITPGSKAAAANLCPGDVILAIDGYGTESMTHADAQDRIKAAAHQLCLKIDRAETRLWSPQVTEDGKAHPFKINLESEPQDVNYFEHKHNIRPKPFIIPGRSSGCSTPSGIDGGSGRSTPSSVSTLSTICPGDLKVAAKMAPNIPLEMELPGVKIVHAQFNTPMQLYSDDNIMETLQGQVSTALGETPSMSEPTTASVPPQSDVYRMLHDNRNEPTQPRQSGSFRVLQELVNDGPDDRPAGTRSVRAPVTKIHGGAGGTQKMPLCDKCGSGIVGAVVKARDKYRHPECFVCADCNLNLKQKGYFFVEGELYCETHARARMRPPEGYDTVTLYPKA

SEQ ID NO: 91 - protein, 431 aa, Bos taurus
MTPSKSSKAPFTFLPSAFLGKKHFAQMKRAHLFVVGVYLLSSCRAEEGLNFPTYDGKDRVVSLTEKNFKQVLKKYDLLCLYYHEPLSSDKVVQKQFQLKEIVLELVAQVLEHKDIGFVMVDAKKEAKLAKKLGFDEEGSLYILKGDRTIEFDGEFAADVLVEFLLDLIEDPVEIINSKLEVQAFERIEDHIKLIGFFKSEESEHYKAFEEAAEHFQPYIKFFATFDKGVAKKLSLKMNEVDFYEPFMDEPIAIPDKPYTEEELVEFVKEHQRPTLRRLRPEDMFETWEDDLNGIHIVAFAERSDPDGYEFLEILKQVARDNTDNPDLSIVWIDPDDFPLLVAYWEKTFKIDLFKPQIGVVNVTDADSVWMDIPDDDDLPTAEELEDWIEDVLSGKINTEDDDNDDEEDEDDDDDDDNSDEEDNDDSDDDDE

SEQ ID NO: 92 - protein, 377 aa, Gallus gallus
MCEEEDSTALVCDNGSGLCKAGFAGDDAPRAVFPSIVGRPRHQGVMVGMGQKDSYVGDEAQSKRGILTLKYPIEHGIITNWDDMEKIWHHSFYNELRVAPEEHPTLLTEAPLNPKANREKMTQIMFETFNVPAMYVAIQAVLSLYASGRTTGIVLDSGDGVTHNVPIYEGYALPHAIMRLDLAGRDLTDYLMKILSERGYSFVTTAEREIVRDIKEKLCYVALDFENEMATAASSSSLEKSYELPDGQVITIGNERFRCPETLFQPSFIGMESAGIHETTYNSIMKCDIDIRKDLYANNVLSGGTTMYPGIADRMQKEITALAPSTMKIKIIAPPERKYSVWIGGSILASLSTFQQMWISKQEYDEAGPSIVHRKCF

SEQ ID NO: 93 - protein, 376 aa, Gallus gallus
MCEEETTALVCDNGSGLCKAGFAGDDAPRAVFPSIVGRPRHQGVMVGMGQKDSYVGDEAQSKRGILTLKYPIEHGIITNWDDMEKIWHHSFYNELRVAPEEHPTLLTEAPLNPKANREKMTQIMFETFNVPAMYVAIQAVLSLYASGRTTGIVLDSGDGVTHNVPIYEGYALPHAIMRLDLAGRDLTDYLMKILTERGYSFVTTAEREIVRDIKEKLCYVALDFENEMATAASSSSLEKSYELPDGQVITIGNERFRCPETLFQPSFIGMESAGIHETTYNSIMKCDIDIRKDLYANNVLSGGTTMYPGIADRMQKEITALAPSTMKIKIIAPPERKYSVWIGGSILASLSTFQQMWISKPEYDEAGPSIVHRKCF

SEQ ID NO: 94 - protein, 172 aa, Gallus gallus
MSSKRAKTKTTKKRPQRATSNVFAMFDQSQIQEFKEAFNMIDQNRDGFIDKEDLHDMLASLGKNPTDEYLDAMMNEAPGPINFTMFLTMFGEKLNGTDPEDVIRNAFACFDEEATGFIQEDYLRELLTTMGDRFTDEEVDELYREAPIDKKGNFNYIEFTRILKHGAKDKDD

SEQ ID NO: 95 - protein, 1979 aa, Gallus gallus
MSQKPLSDDEKFLFVDKNFVNNPLAQADWSAKKLVWVPSEKHGFEAASIKEEKGDEVTVELQENGKKVTLSKDDIQKMNPPKFSKVEDMAELTCLNEASVLHNLRERYFSGLIYTYSGLFCVVINPYKQLPIYSEKIIDMYKGKKRHEMPPHIYAIADTAYRSMLQDREDQSILCTGESGAGKTENTKKVIQYLAVVASSHKGKKDTSITQGPSFSYGELEKQLLQANPILEAFGNAKTVKNDNSSRFGKFIRINFDVTGYIVGANIETYLLEKSRAIRQAKDERTFHIFYYLIAGASEQMRNDLLLEGFNNYTFLSNGHVPIPAQQDDEMFQETLEAMTIMGFTEEEQTSILRVVSSVLQLGNIVFKKERNTDQASMPDNTAAQKVCHLMGINVTDFTRSILTPRIKVGRDVVQKAQTKEQADFAIEALAKAKFERLFRWILTRVNKALDKTKRQGASFLGILDIAGFEIFEINSFEQLCINYTNEKLQQLFNHTMFILEQEEYQREGIEWNFIDFGLDLQPCIELIERPTNPPGVLALLDEECWFPKATDTSFVEKLIQEQGNHAKFQKSKQLKDKTEFCILHYAGKVTYNASAWLTKNMDPLNDNVTSLLNQSSDKFVADLWKDVDRIVGLDQMAKMTESSLPSASKTKKGMFRTVGQLYKEQLTKLMTTLRNTNPNFVRCIIPNHEKRAGKLDAHLVLEQLRCNGVLEGIRICRQGFPNRIVFQEFRQRYEILAANAIPKGFMDGKQACILMIKALELDPNLYRIGQSKIFFRTGVLAHLEEERDLKITDVIIAFQAQCRGYLARKAFAKRQQQLTAMKVIQRNCAAYLKLRNWQWWRLFTKVKPLLQVTRQEEEMQAKDEELQRTKERQQKAEAELKELEQKHTQLCEEKNLLQEKLQAETELYAEAEEMRVRLAAKKQELEEILHEMEARIEEEEERSQQLQAEKKKMQQQMLDLEEQLEEEEAARQKLQLEKVTADGKIKKMEDDILIMEDQNNKLTKERKLLEERVSDLTTNLAEEEEKAKNLTKLKNKHESMISELEVRLKKEEKSRQELEKIKRKLEGESSDLHEQIAELQAQIAELKAQLAKKEEELQAALARLEDETSQKNNALKKIRELESHISDLQEDLESEKAARNKAEKQKRDLSEELEALKTELEDTLDTTATQQELRAKREQEVTVLKRALEEETRTHEAQVQEMRQKHTQAVEELTEQLEQFKRAKANLDKTKQTLEKDNADLANEIRSLSQAKQDVEHKKKKLEVQLQDLQSKYSDGERVRTELNEKVHKLQIEVENVTSLLNEAESKNIKLTKDVATLGSQLQDTQELLQEETRQKLNVTTKLRQLEDDKNSLQEQLDEEVEAKQNLERHISTLTIQLSDSKKKLQEFTATVETMEEGKKKLQREIESLTQQFEEKAASYDKLEKTKNRLQQELDDLVVDLDNQRQLVSNLEKKQKKFDQMLAEEKNISSKYADERDRAEAEAREKETKALSLARALEEALEAKEELERTNKMLKAEMEDLVSSKDDVGKNVHELEKSKRTLEQQVEEMKTQLEELEDELQAAEDAKLRLEVNMQAMKSQFERDLQARDEQNEEKRRQLLKQLHEHETELEDERKQRALAAAAKKKLEVDVKDLESQVDSANKAREEAIKQLRKLQAQMKDYQRDLDDARAAREEIFATARENEKKAKNLEAELIQLQEDLAAAERARKQADLEKEEMAEELASANSGRTSLQDEKRRLEARIAQLEEELDEEHSNIETMSDRMRKAVQQAEQLNNELATERATAQKNENARQQLERQNKELRSKLQEMEGAVKSKFKSTIAALEAKIASLEEQLEQEAREKQAAAKTLRQKDKKLKDALLQVEDERKQAEQYKDQAEKGNLRLKQLKRQLEEAEEESQRINANRRKLQRELDEATESNDALGREVAALKSKLRRGNEPVSFAPPRRSGGRRVIENATDGGEEEIDGRDGDFNGKASE

SEQ ID NO: 96 - protein, 151 aa, Gallus gallus
MCDFSEEQTAEFKEAFQLFDRTGDGKILYSQCGDVMRALGQNPTNAEVMKVLGNPKSDEMNLKTLKFEQFLPMMQTIAKNKDQGCFEDYVEGLRVFDKEGNGTVMGAEIRHVLVTLGEKMTEEEVEQLVAGHEDSNGCINYEELVRMVLSG

SEQ ID NO: 97 - protein, 462 aa, Gallus gallus
QSYSSSQRVSSYRRTFGGGTSPVFPRASFGSRGSGSSVTSRVYQVSRTSAVPTLSTFRTTRVTPLRTYGSAYQGAGELLDFSLADAMNQEFLQTRTNEKVELQELNDRFANYIEKVRFLEQQNALMVAEVNRLRGKQPTRVAEMYEEELRELRRQVDALTGQRARVEVERDNLLDNLQKLKQKLQEEIQLKQEAENNLAAFRADVDAATLARIDLERRIESLQEEIAFLKKVHEEEIRELQAQLQEQHIQVEMDISKPDLTAALRDIRAQYESIAAKNIAEAEEWYKSKVSDLTQAANKNNDALRQAKQEMLEYRHQIQSYTCEIDALKGTNDSLMRQMREMEERFAGEAGGYQDTIARLEEEIRHLKDEMARHLREYQDLLNVKMALDVEIATYRKLLEGEENRISIPMHQTFASALNFRETSPDQRGSEVHTKKTVMIKTIETRDGEVVSEATQQQHEVL

SEQ ID NO: 98 - protein, 284 aa, Gallus gallus
MEAIKKKMQMLKLDKENAIDRAEQAEADKKQAEDRCKQLEEEQQGLQKKLKGTEDEVEKYSESVKEAQEKLEQAEKKATDAEAEVASLNRRIQLVEEELDRAQERLATALQKLEEAEKAADESERGMKVIENRAMKDEEKMELQEMQLKEAKHIAEEADRKYEEVARKLVVLEGELERSEERAEVAESRVRQLEEELRTMDQSLKSLIASEEEYSTKEDKYEEEIKLLGEKLKEAETRAEFAERSVAKLEKTIDDLEESLASAKEENVGIHQVLDQTLLELNNL

SEQ ID NO: 99 - protein, 162 aa, Sus scrofa
MGLETEKADVQLFMDDDSYSRHSGVDYADPKKFVDPGTDRDPHRLNSNLKVGFEDVIAEPVSTHSFDKVWICSHALFEISKYVIYKFLTVFLAIPLAFAAGILFATLSCLHIWIIIPFVKTCLMVLPSVQTIWKSVTDVVIAPLCTSAGRSFSSVSLQLSHD

SEQ ID NO: 100 - protein, 1004 aa, Gallus gallus
MKMADAKQKRNEQLKRWIGSETDLEPPVVKRKKTKVKFDDGAVFLAACSSGDTEEVLRLLERGADINYANVDGLTALHQACIDDNVDMVKFLVENGANINQPDNEGWIPLHAAASCGYLDIAEYLISQGAHVGAVNSEGDTPLDIAEEEAMEELLQNEVNRQGVDIEAARKEEERIMLRDARQWLNSGHINDVRHAKSGGTALHVAAAKGYTEVLKLLIQARYDVNIKDYDGWTPLHAAAHWGKEEACRILVENLCDMEAVNKVGQTAFDVADEDILGYLEELQKKQNLLHSEKREKKSPLIESTANLDNNQTQKTFKNKETLIMEQEKNASSIESLEHEKADEEEEGKKDESSCSSEEEEDDDSESEAETDKAKTLANANTTSTQSASMTAPSVAGGQGTPTSPLKKFPTSTTKVSPKEEERKDESPASWRLGLRKTGSYGALAEITASKEAQKEKDSAGVIRSASSPRLSSSLDNKEKEKDGKGTRLAYVAPTIPRRLASTSDIDEKENRDSSASSIRSGSSYARRKWEEDVKKNSLNEGPTSLNTSYQRSGSFGRRQDDLVSSNVPSTASTVTSSAGLQKTLPASANTTTKSTTGSTSAGVQSSTSNRLWAEDSTEKEKDSVPTAVTVPVAPSVVNAAATTTAMTTATSGTVSSTSEVRERRRSYLTPVRDEESESQRKARSRQARQSRRSTQGVTLTDLQEAEKTIGRSRSTRTREQENEEKEKEEKEKQDKEKQEEKKESETKDDDYRQRYSRTVEEPYHRYRPTSTSTSTSSTSSLSTSTSSLSSSSQLNRPNSLIGITSAYSRSGTKESEREGGKKEEEKEEDKSQPKSIRERRRPREKRRSTGVSFWTQDSDENEQEHQSDSEEGTNKKETQSDSLSRYDTGSLSVSSGDRYDSAQGRSGSQSYLEDRKPYCSRLEKEDSTDFKKLYEQILAENEKLKAQLHDTNMELTDLKLQLEKTTQRQERFADRSLLEMEKRVSGKSQYLLGGKKSSRKKDI

SEQ ID NO: 101 - protein, 252 aa, Gallus gallus
MSNANFNRGPAYGLSAEVKNKLAQKYDPQTERQLRVWIEGATGRRIGDNFMDGLKDGVILCELINKLQPGSVQKVNDPVQNWHKLENIGNFLRAIKHYGVKPHDIFEANDLFENTNHTQVQSTLIALASQAKTKGNNVGLGVKYAEKQQRRFQPEKLREGRNIIGLQMGTNKFASQQGMTAYGTRRHLYDPKLGTDQPLDQATISLQMGTNKGASQGMTVYGLPRQVYDPKYCDAPGLLGEDGLNHSFYNSQ

SEQ ID NO: 102 - protein, 305 aa, Gallus gallus
MSSSQFNKGPSYGLSAEVKNRLAQKYDPQKEAELRTWIESVTGRQIGADFQKGLKDGVILCELMNKLQPNSVRKINRSALNWHQLENLSNFIKAMVSYGMNPVDLFEANDLFESGNLTQVQVSLLALAGMAKTKGLQSGVDIGVKYSERQQRNFDEAKMKAGQCVIGLQMGTNKCASQSGMTAYGTRRHLYDPKNQILPPMDHSTISLQMGTNKCASQVGMTAPGTRRHIYDAKMGLEKCDNSSMSLQMGSNQGANQSGQVFGLGRQIYDPKYCPQGTPGDAANAAGEPGADPPGYHYYHQEESC

SEQ ID NO: 103 - protein, 331 aa, Gallus gallus
MTHFNKGPSYGLSAEVKNKIALKYDPQIEEDLRNWIEEVTGLSIGANFQLGLKDGIILCELINKLQPGSVKKINQSKLNWHQLENIGNFIKAIQVYGMKPHDIFEANDLFENGNMTQVQTTLVALAGLAKTKGFHTTIDIGVKYAEKQARSFDAGKLKAGQSVIGLQMGTNKCASQAGMTAYGTRRHLYDPKMQTDKPFDQTTISLQMGTNKGASQAGMLAPGTRRDIYDQKHILQPVDNSTISLQMGTNKVASQKGMSVYGLGRQVYDPKYCAAPTEPVIHNGSQGTGTNGSEISDSDYQAEYPDDYHGEYQDDYQRDYHGQYSDQGIDY

SEQ ID NO: 104 - protein, 200 aa, Gallus gallus
MANKGPAYGMSRDVQSKIEKKYDDELEDRLVEWIVAQCGSSVGRPDRGRLGFQVWLKNGIVLSQLVNSLYPDGSKPVKIPDSPPTMVFKQMEQIAQFLKAAEDYGVVKTDMFQTVDLFEAKDMAAVQRTLVALGSLAVTKNDGHYHGDPNWFMKKAQEHKREFSESQLKEGKNIIGLQMGTNKGASQAGMSYGRPRQIIS

SEQ ID NO: 105 - protein, 748 aa, Gallus gallus
RLSYQRNDDDEEEAARERRRRARQERLRQKEEGDVSGEVTEKSEVNAQNSVAEEETKRSTDDEAALLERLARREERRQKRLQEALERQKEFDPTITDGSLSVPSRREVNNVEENETTGKEEKVETRQGRCEIEETETVTKSYQRNNWRQDGEEEGKKEEKDSEEEKPKEVPTEENQVDVAVEKSTDKEEVVETKTLAVNAENDTNAMLEGEQSITDAADKEKEEAEKEREKLEAEEKERLKAEEEKKAAEEKQKAEEEKKAAEERERAKAEEEKRAAEERERAKAEEERKAAEERERAKAEEERKAAEERAKAEEERKAAEERAKAEEERKAAEERAKAEKERKAAEERERAKAEEEKRAAEEKARLEAEKLKEKKKMEEKKAQEEKAQANLLRKQEEDKEAKVEAKKESLPEKLQPTSKKDQVKDNKDKEKAPKEEMKSVWDRKRGVPEQKAQNGERELTTPKLKSTENAFGRSNLKGAANAEAGSEKLKEKQQEAAVELDELKKRREERRKILEEEEQKKKQEEAERKIREEEEKKRMKEEIERRRAEAAEKRQKVPEDGVSEEKKPFKCFSPKGSSLKIEERAEFLNKSAQKSGMKPAHTTAVVSKIDSRLEQYTSAVVGNKAAKPAKPAASDLPVPAEGVRNIKSMWEKGNVFSSPGGTGTPNKETAGLKVGVSSRINEWLTKTPEGNKSPAPKPSDLRPGDVSGKRNLWEKQSVEKPAASSSKVTATGKKSETNGLRQFEKEP

SEQ ID NO: 106 - protein, 2541 aa, Gallus gallus
MVALSLKISIGNVVKTMQFEPSTMVYDACRMIRERVPEAQMGQPNDFGLFLSDEDPKKGIWLEAGKALDYYMLRNGDTMEYKKKQRPLKIRMLDGTVKTVMVDDSKTVTDMLMTICARIGITNYDEYSLVREIMEEKKEEVTGTLKKDKTLLRDEKKMEKLKQKLHTDDELNWLDHGRTLREQGIDDNETLLLRRKFFYSDQNVDSRDPVQLNLLYVQARDDILNGSHPVSFDKACEFAGYQCQIQFGPHNEQKHKPGFLELKDFLPKEYIKQKGERKIFMAHKNCGNMSEIEAKVRYVKLARSLKTYGVSFFLVKEKMKGKNKLVPRLLGITKECVMRVDEKTKEVIQEWSLTNIKRWAASPKSFTLDFGDYQDGYYSVQTTEGEQIAQLIAGYIDIILKKKKSKDHFGLEGDEESTMLEDSVSPKKSTVLQQQFNRVGKAELGSVALPAIMRTGAGGPENFQVGTMPQAQMQITSGQMHRGHMPPLTSAQQALTGTINSSMQAVNAAQATLDDFETLPPLGQDAASKAWRKNKMDESKHEIHSQVDAITAGTASVVNLTAGDPADTDYTAVGCAVTTISSNLTEMSKGVKLLAALMEDEGGNGRQLLQAAKNLASAVSDLLKTAQPASAEPRQNLLQAAGLVGQTSGELLQQIGESDTDPRFQDMLMQLAKAVASAAAALVLKAKNVAQKTEDSALQTQVIAAATQCALSTSQLVACTKVVAPTISSPVCQEQLIEAGKLVAKSAEGCVEASKAATNDDQLLKQVGVAATAVTQALNDLLQHIKQHATGGQPIGRYDQATDTILNVTENIFSSMGDAGEMVRQARILAQATSDLVNAIKADAEGETDLENSRKLLSAAKILADATAKMVEAAKGAAAHPDSEEQQQRLREAAEGLRMATNAAAQNAIKKKLVHKLEHAAKQAAASATQTIAAAQHAAASNKNPAAQQQLVQSCKVVADQIPMLVQGVRGSQSQPDSPSAQLALIAASQNFLQPGGKMVAAAKATVPTITDQASAMQLSQCAKNLAAALAELRTAAQKAQEACGPLEIDSALGLVQSLERDLKEAKAAARDGKLKPLPGETMEKCAQDLGNSTKAVTSAIAHLLGEVAQGNENYTGIAAREVAQALRSLSQAARGVAANSSDPQVQNAMLECASDVMDKANNLIEEARKAVAKPGDPDSQQRLVQVAKAVSQALNRCVNCLPGQRDVDAAIRMVGEASKRLLSDSFPPSNKTFQEAQSQLNRAAAGLNQSANELVQASRGTPQDLAKSSGKFGQDFNEFLQAGVEMASLSPTKEDQAQVVSNLKSISMSSSKLLLAAKALSADPTSPNLKSQLAAAARAVTDSINQLITMCTQQAPGQKECDNALRELETVKELLENPTQTVNDMSYFSCLDSVMENSKVLGESMAGISQNAKNSKLPEFGESISAASKALCGLTEAAAQAAYLVGVSDPNSQAGQQGLVDPTQFARANQAIQMACQNLVDPACTQSQVLSAATIVAKHTSALCNTCRLASSRTANPVAKRQFVQSAKEVANSTANLVKTIKALDGAFNEENRERCRAATAPLIEAVDNLTAFASNPEFATVPAQISPEGRRAMEPIVTSAKTMLESSAGLIQTARSLAVNPKDPPQWSVLAGHSRTVSDSIKKLITNMRDKAPGQRECDEAIDVLNRCMREVDQASLAAISQQLAPREGISQEALHNQMITAVQEINNLIEPVASAARAEASQLGHKVSQMAQYFEPLILAAIGAASKTPNHQQQMNLLDQTKTLAESALQMLYTAKEAGGNPKQAAHTQEALEEAVQMMKEAVEDLTTTLNEAASAAGVVGGMVDSITQAINQLDEGPMGEPEGTFVDYQTTMVKTAKAIAVTVQEMVTKSTTNPDELGILANQLTNDYGQLAQQAKPAALTAENEEIGSHIKRRVQELGHGCAALVTKAGALQCSPSDAYTKKELIESARKVSEKVSHVLAALQAGNRGTQACITAASAVSGIIADLDTTIMFATAGTLNRENSETFADHREGILKTAKALVEDTKVLVQNATASQEKLAQAAQSSVSTITRLAEVVKLGAASLGSEDPETQVVLINAVKDVAKALGDLIGATKAAAGKAGDDPAVYQLKNSAKVMVTNVTSLLKTVKAVEDEATKGTRALEATIEHIRQELAVFSSPVPPAQVSTPEDFIRMTKGITMATAKAVAAGNSCRQEDVIATANLSRRAIADMLRACKEAAYHPEVSADVRQRALRFGKECADGYLELLEHVLVILQKPTHELKQQLAGYSKRVASSVTELIQAAEAMKGTEWVDPEDPTVIAENELLGAAAAIEAAAKKLEQLKPRAKPKQADESLDFEEQILEAAKSIAAATSALVKAASAAQRELVAQGKVGVIPANAVDDGQWSQGLISAARMVAAATNNLCEAANAAVQGHASEEKLISSAKQVAASTAQLLVACKVKADHDSEAMKRLQAAGNAVKRASDNLVKAAQKAAAFQDHDETVVVKEKMVGGIAQIIAAQEEMLRKERELEEARKKLAMIRQQQYKFLPTELRDEEQN

SEQ ID NO: 107 - protein, 134 aa, Gallus gallus
MNCWNYYTDCILSDKYIDDVAIVGLSDNKYVWAAKPGGLLSAVSPREVDLITGQDRITFLTAGISIAGKKCIVIRDSLLVEGDNVMDIRSRGGDSRSICIGKTPKALIFLMGNRGVHGGVLNLKIHDMIAGMTL

SEQ ID NO: 108 - protein, 149 aa, Gallus gallus
MIQLQALLKESLIRTKHVENAAAIGINEREVCASTSGFYVPPENAINLIYAFYKNLLQVRKEGLYFRQKHYECVRADEHSIYLKNAEGGLIVVKTNALILIATYRVGMYPSVCVEAVEKLGKTNTCTCMAACQRFIGWLCSCKELQKCV

SEQ ID NO: 109 - protein, 423 aa, Gallus gallus
MATYSFRQTTSSVAGGPCGRSLRLGGGSFRAPSIHGGSGGRGVSVSSARFVSSGLGSGLGGGYGGAFSSSFSAGFGGGYGGGLGSGDGLLSGNEKTTMQNLNDRLASYLDKVRALEEANSDLETKIREWYLKQGPGPARDYSPYYKAIEDLRDQILAATIDNSKVVLQIDNARLAADDFKTKFETEQALRMSVEADINGLRRVLDELTLARTDLELQIENLKEELAYLKKNHEEEMSALGGQVASQVSVEVDSAPGIDLSKILADMRDQYEHMAEKNRKDAEAWFHSKTEELNRELAVNTEQLQSSKSEVTDLRRTLQGLEIELQSQLSMKGALESTLADTEGRYGAQLAQIQDMIGSIEAQLAELRADMERQNSEYKMLMDIKTRLEQEIATYRQLLEGQESQLFGSLSGSPDKRDKPADGK

SEQ ID NO: 110 - protein, 161 aa, Salmo salar
MDDVYKAAVENLTEEQKNEFKAAFDIACQGAEDGCISTKELGKVMRMLGQNPTPEELQEMIDEVDEDGSGTVDFDEFLVMMVRCMKEESKGKSEEELAELFRMFDKNGDGYIDLEELKTMLESTGEAITEDDIEELMKDGDKNNDGKIDYDEFLEFMKGVE

SEQ ID NO: 111 - protein, 161 aa, Gallus gallus
MDDIYKAAVEQLTEEQKNEFKAAFDIFVLGAEDGCISTKELGKVMRMLGQNPTPEELQEMIDEVDEDGSGTVDFDEFLVMMVRCMKDDSKGKTEEELSDLFRMFDKNADGYIDLEELKIMLQATGETITEDDIEELMKDGDKNNDGRIDYDEFLEFMKGVE

SEQ ID NO: 112 - protein, 161 aa, Bos taurus
MDDIYKAAVEQLTEEQKNEFKAAFDIFVLGAEDGCISTKELGKVMRMLGQNPTPEELQEMIDEVDEDGSGTVDFDEFLVMMVRCMKDDSKGKSEEELSDLFRMFDKNADGYIDLEELKIMLQATGETITEDDIEELMKDGDKNNDGRIDYDEFLEFMKGVE

SEQ ID NO: 113 - protein, 272 aa, Gallus gallus
MSDQQLDCALDLMRRLPPQQIEKNLSDLIDLVPSLCEDLLSSVDQPLKIARDKVVGKDYLLCDYNRDGDSYRSPWSNKYDPPLEDGAMPSARLRKLEVEANNAFDQYRDLYFEGGVSSVYLWDLDHGFAGVILIKKAGDGSKKIKGCWDSIHVVEVQEKSSGRTAHYKLTSTVMLWLQTNKTGSGTMNLGGSLTRQMEKDETVSDSSPHIANIGRLVEDMENKIRSTLNEIYFGKTKDIVNGLRSVQTFADKSKQEALKNDLVEALKRKQQS

SEQ ID NO: 114 - protein, 782 aa, Bos taurus
MSGAPKESLGPQGLPGLGKACLTTMDKKLNMLNEKVDKLLHFQEDVTEKLQCVYRGMGHLEQGLHRLEASRGLGPAGADRSPPSDAQAGWPEVLELVRAGRQDAAQQGARLEALFRMVMAVDKAIALVGAVLQNSKVVDFIMQGSVPWRKGSLADNKEQVEEKEAKPKHTLSTRGVQAELRGPWEESQKADLPEGTGSDLPTQTEAPPEQRDGISGPTQVRPEVEVQAPRASSKNPGIGLELSVVSERVSEAPTGQEAALSAGRGTSPSRPDPRPSVEGMRLTPAPPAQAKAAHGGGETPPRISIHVQETDTPGELLVTRGGSLRTSPPAETPAAVPPGEQDPPGPRCCPQAPGTESGKPILRGASVRKRSCDEGAKAKEKQGPGSELTMAPSRARRDKGADSGASGPQQDMNPGAGNPDPGKDCTAGGVGSAEAGSRTPPGAEASSLVLDDSPAPPAPFEHRVVSVRETSTSAGYTVCQHEVLGGGRFGQVHRCTEKATGLSLAAKIIKVKSAKDREDVKNEINIMNQLSHVNLIQLYDAFESKNSFTLVMEYVDGGELFDRITEEKYHLTELDVVLFTKQICEGVHYLHQHYVLHLDLKPENILCVNQTGHQIKIIDFGLARRYKPREKLKVNFGTPEFLAPEVVNYEFVSFPTDMWSVGVITYMLLSGLSPFLGETDAETMNFIVNCNWDFDADTFEGLSEEAKDFVSRLLVKEKSCRMSATQCLKHEWLNNLPAKASKSKVHLKSQLLLQKYMAQRKWKKHFYVVTAANRLRKFPTCP

SEQ ID NO: 115 - protein, 161 aa, Salmo salar
MNDIYKAAVEQLTDEQKNEFKAAFDIFVQDAEDGCISTKELGKVMRMLGQNPTPEELQEMIDEVDEDGSGTVDFDEFLVMMVRCMKDDSKGKTEEELADLFRMFDKNADGYIDLEELKVMLEATGEAITEDDIEELMKDGDKNNDGKIDYDEFLEFMKGVE

SEQ ID NO: 116 - protein, 167 aa, Sus scrofa
MATSELSCQVSEENCERREAFWAEWKDLTLSTRPEEGCSLHEEDAERRETYHQQGQCQALVQRSPWLVMRMGILGRGLQEYQLPYQRVLPLPIFTPAKVGAAKEEREETPIQLRELLALETALGGQCLDRQDVAEITKQLPPVVPVSKPGALRRSLSRSMSQEAQRG

SEQ ID NO: 117 - protein, 284 aa, Gallus gallus
MDAIKKKMQMLKLDKENALDRAEQAEADKKAAEERSKQLEDELVALQKKLKGTEDELDKYSESLKDAQEKLELADKKATDAESEVASLNRRIQLVEEELDRAQERLATALQKLEEAEKAADESERGMKVIENRAQKDEEKMEIQEIQLKEAKHIAEEADRKYEEVARKLVIIEGDLERAEERAELSESKCAELEEELKTVTNNLKSLEAQAEKYSQKEDKYEEEIKVLTDKLKEAETRAEFAERSVTKLEKSIDDLEDELYAQKLKYKAISEELDHALNDMTSI

SEQ ID NO: 118 - protein, 283 aa, Gallus gallus
MEAIKKKMQMLKLDKENAIDRAEQAEADKKQAEDRCKQLEEEQQGLQKKLKGTEDEVEKYSESVKEAQEKLEQAEKKATDAEAEVASLNRRIQLVEEELDRAQERLATALQKLEEAEKAADESERGMKVIENRAMKDEEKMELQEMQLKEAKHIAEEADRKYEEVARKLVVLEGELERSEERAEVAESKCGDLEEELKIVTNNLKSLEAQADKYSTKEDKYEEEIKLLGEKLKEAETRAEFAERSVAKLEKTIDDLEERSRQEAEKNRVLTNELRVILTELNN

SEQ ID NO: 119 - protein, 151 aa, Bos taurus
MMAEEHTDLEAQIVKDIHFKEIDLVNRDPKNINEDIVKVDFEDVIAEPVGTYSFDGVWKVSYTTFTVSKYWCYRLLSTLLGVPLALLWGFLFACISFCHIWAVVPCIKSYLIEIQCISHIYSLCIRTFCNPLFAALGQVCSNIKVMLRKEV

SEQ ID NO: 120 - protein, 1450 aa, Gallus gallus
MSSVAVPFYQRRHKHFDQSYRNIQTRYVLEEYAARKAASRQAAHYESTGLGKTTCRLCARRARSLAHEAMQESRKRTHEQKSHASDEKRIKFASELSSLEREIHMARHHAREQLDRLAIQRMVEENMALERHVVEEKISRAPEILVRLRSHTVWEKMSVRLCFTVQGFPSPVVQWYKNEELITPASDPAKYSVENKYGVHVLHINRADFDDSATYSAVATNIHGQASTNCAVVVRRFRESEEPHPAGIMPFHLPLSYDVCFTHFDVQFLEKFGVTFATEGETLTLKCSVLVTPELKRLRPRAEWYRDDVLIKDSKWTKLYFGEGQAALSFTHLNKDDEGLYTLRMVTKGGVNECSAFLFVRDADALIAGAPGAPMDVKCHDANRDYVIVTWKPPNTTSQNPVIGYFVDKCEVGLENWVQCNDAPVKICKYPVTGLYEGRSYIFRVRAVNSAGISRPSRVSEPVAALDPVDLERTQTVHVDEGRKIVISKDDLEGDIQIPGPPTNVHASEISKTYVVLSWDPPVPRGREPLTYFIEKSMVGSGSWQRVNAQVAVKSPRYAVFDLAEGKPYVFRVLSANKHGISDPSEITEPIQPQDIVVVPSAPGRVVATRNTKTSVVVQWDKPKHEENLYGYYIDYSVVGSNQWEPANHKPINYNRFVVHGLETGEQYIFRVKAVNAVGFSENSQESEAIKVQAALTCPSYPHGITLLNCDGHSMTLGWKAPKYSGGSPILGYYIDKREANHKNWHEVNSSVISRTIYTVEDLTEDAFYEFKIAAANVVGIGHPSDPSEHFKCKAWTMPEPGPAYDLTVCEVRNTSLVLLWKAPVYEGKSPITGYLVDYKEVDTEDWITANEKPTSHRYFKVTDLHQGHTYVFKVRAVNDAGVGKSSEISEPVFVEASPGTKEIFSGVDEEGNIYLGFECKEATDASHFLWGKSYEEIEDSDKFKIETKGDHSKLYFKHPDKSDLGTYCISVSDTDGVSSSFVLDEEELERLMTLSNEIKNPTIPLKSELAYEVLDKGEVRFWIQAESLSPNSTYRFVINDKEVENGDRHKISCDHSNGIIEMVMDKFTIDNEGTYTVQIQDGKAKNQSSLVLIGDAFKAILAESELQRKEFLRKQGPHFSEFLYWEVTEECEVLLACKIANTKKETVFKWYRNGSGIDVDEAPDLQKGECHLTVPKLSRKDEGVYKATLSDDRGHDVSTLELSGKVYNDIILALSRVSGKTASPLKILCTEEGIRLQCFLKYYNEEMKVTWSHRESKISSGEKMKIGGGEDVAWLQITEPTEKDKGNYTFEIFSDKESFKRTLDLSGQAFDDALTEFQRLKAAAFAEKNRGKVIGGLPDVVTIMDGKTLNLTCTVFGNPDPEVVWFKNDKALELNEHYLVSLEQGKYASLTIKGVTSEDSGKYSIYVKNKYGGETVDVTVSVYRHGEKIPEVNQGQLAKPRLIPPSSST

SEQ ID NO: 121 - protein, 2723 aa, Bos taurus
MMNNSGYSEAPGFGLGDEVDDMPSTEKDLAEDAPWKKIQQNTFTRWCNEHLKCVGKRLTDLQRDLSDGLRLIALLEVLSQKRMYRKFHPRPNFRQMKLENVSVALEFLEREHIKLVSIDSKAIVDGNLKLILGLIWTLILHYSISMPMWEDEDDEDARKQTPKQRLLGWIQNKVPQLPITNFNRDWQDGKALGALVDNCAPGLCPDWEAWDPNQPVENAREAMQQADDWLGVPQVIAPEEIVDPNVDEHSVMTYLSQFPKAKLKPGAPVRSKQLNPKKAIAYGPGIEPQGNTVLQPAHFTVQTVDAGIGEVLVYIEDPEGHTEEAKVVPNNDKNRTYAVSYVPKVAGLHKVTVLFAGQNIERSPFEVNVGMALGDANKVSARGPGLEPVGNVANKPTYFDIYTAGAGTGDVAVVIVDPQGRRDTVEVALEDKGDSTFRCTYRPVMEGPHTVHVAFAGAPITRSPFPVHVAEACNPNACRASGRGLQPKGVRVKEVADFKVFTKGAGSGELKVTVKGPRGTEEPVKVREAGDGVFECEYYPVVPGKYVVTITWGGYAIPRSPFEVQVSPEAGIQKVRAWGPGLETGQVGKSADFVVEAIGTEVGTLGFSIEGPSQAKIECDDKGDGSCDVRYWPTEPGEYAVHVICDDEDIRDSPFIAHIQPAPPDCFPDKVKAFGPGLEPTGCIVDKPAEFTIDARAAGKGDLKLYAQDADGCPIDIKVIPNGDGTFRCSYVPTKPIKHTIIVSWGGVNVPKSPFRVNVGEGSHPERVKVYGPGVEKTGLKANEPTYFTVDCSEAGQGDVSIGIKCAPGVVGPAEADIDFDIIKNDNDTFTVKYTPPGAGRYTIMVLFANQEIPASPFHIKVDPSHDASKVKAEGPGLNRTGVEVGKPTHFTVLTKGAGKAKLDVHFAGAAKGEAVRDFEIIDNHDYSYTVKYTAVQQGNMAVTVTYGGDPVPKSPFVVNVAPPLDLSKVKVQGLNSKVAVGQEQAFSVNTRGAGGQGQLDVRMTSPSRRPIPCKLEPGGGAETQAVRYMPPEEGPYKVDITYDGHPVPGSPFAVEGVLPPDPSKVCAYGPGLKGGLVGTPAPFSIDTKGAGTGGLGLTVEGPCEAKIECQDNGDGSCAVSYLPTEPGEYTINILFAEAHIPGSPFKATIRPVFDPSKVRASGPGLERGKAGEAATFTVDCSEAGEAELTIEILSDAGVKAEVLIHNNADGTYHITYSPAFPGTYTITIKYGGHPVPKFPTRVHVQPAVDTSGVKVSGPGVEPHGVLREVTTEFTVDARSLTATGGNHVTARVLNPSGAKTDTYVTDNGDGTYRVQYTAYEEGAHLVEVLYDDVAVPKSPFRVGVTEGCDPTRVRAFGPGLEGGLVNKANRFTVETRGAGTGGLGLAIEGPSEAKMSCKDNKDGSCTVEYIPFTPGDYDVNITFGGRPIPGSPFRVPVKDVVDPGKVKCSGPGLGAGVRARVPQTFTVDCSQAGRAPLQVAVLGPTGVAEPVEVRDNGDGTHTVHYTPATDGPYTVAVKYADQEVPRSLSSPFKIKVLPAHDASKVRASGPGLNASGIPASLPVEFTIDARDAGEGLLTVQILDPEGKPKKANIRDNGDGTYTVSYLPDMSGRYTITIKYGGDEIPYSPFRIHALPTGDASKCLVTVSIGGHGLGACLGPRIQIGEETVITVDAKAAGKGKVTCTVSTPDGAELDVDVVENHDGTFDIYYTAPEPGKYVITIRFGGEHIPNSPFHVLACEAMPRVEEPPDVPQLHRPSAYPTHWATEEPVVPAEPMESMLRPFNLVIPFTVQKGELTGEVRMPSGKTARPNITDNKDGTITVRYAPTEKGLHQMGIKYDGNHIPGSPLQFYVDAINSRHVSAYGPGLSHGMVNKPATFTIVTKDAGEGGLSLAVEGPSKAEITCKDNKDGTCTVSYLPTAPGDYSIIVRFDDKHIPGSPFTAKITGDDSMRTSQLNVGTSTDVSLKITESDLSQLTASIRAPSGNEEPCLLKRLPNRHIGISFTPKEVGEHVVSVRKSGKHVTNSPFKILVGPSEIGDASKVRVWGKGLSEGHTFQVAEFIVDTRNAGYGGLGLSIEGPSKVDINCEDMEDGTCKVTYCPTEPGTYIINIKFADKHVPGSPFTVKVTGEGRMKESITRRRQAPSIATIGSTCDLNLKIPGNWFQMVSAQERLTRTFTRSSHTYTRTERTEISKTRGGETKREVRVEESTQVGGDPFPAVFGDFLGRERLGSFGSITRQQEGEASSQDMTAQVTSPSGKTEAAEIVEGEDSAYSVRFVPQEMGPHTVTVKYRGQHVPGSPFQFTVGPLGEGGAHKVRAGGTGLERGVAGVPAEFSIWTREAGAGGLSIAVEGPSKAEIAFEDRKDGSCGVSYVVQEPGDYEVSIKFNDEHIPDSPFVVPVASLSDDARRLTVTSLQETGLKVNQPASFAVQLNGARGVIDARVHTPSGAVEECYVSELDSDKHTIRFIPHENGVHSIDVKFNGAHIPGSPFKIRVGEQSQAGDPGLVSAYGPGLEGGTTGVSSEFIVNTLNAGSGALSVTIDGPSKVQLDCRECPEGHVVTYTPMAPGNYLIAIKYGGPQHIVGSPFKAKVTGPRLSGGHSLHETSTVLVETVTKSSSSRGSSYSSIPKFSSDASKVVTRGPGLSQAFVGQKNSFTVDCSKAGTNMMMVGVHGPKTPCEEVYVKHMGNRVYNVTYTVKEKGDYILIVKWGDESVPGSPFKVNVP

SEQ ID NO: 122 - protein, 352 aa, Gallus gallus
MTLPFRKDLDKYKDLDEDDILGKLSEEELKQLETVLDDLDPENALLPAGFRQKDQTAKKASGPFDRERLLAYLEKQALEHKDREDYVPFTKEKKGKVFIPKQKPAQSYAEEKIALDPELEEALTSATDTELCDLAAILGMSNLITNNQFCDIVGSSNGVGKDSFSNIVKGEKMLPVFDEPPNPTNVEETLQRIKDNDSRLVEVNLNNIKNIPIPTLKEFAKALETNTHVKNFSLAATRSNDPVAVALADMLRVNTKLKSLNIESNFITGVGILALVDALKDNETLTEIKIDNQRQQLGTLAEVEIAKMLEENTKILKFGYHFTQQGPRARAAAAITKNNDLVRKRRVEGDGQ

SEQ ID NO: 123 - protein, 359 aa, Gallus gallus
MSYRKELEKYRDLDEDKILGALTEEELRKLENELEELDPDNALLPAGLRQRDQTQKPPTGPFKREELMAHLEQQAKDIKDREDLVPFTGEKRGKAWIPKQKPMDPVLESVTLEPELEEALANASDAELCDIAAILGMHTLMSNQQYYEALGSSTIVNKEGLNSVIKPTKYKPVPDEEPNSTDVEETLKRIQNNDPDLEEVNLNNIMNIPVPTLKALAEALKTNTYVKKFSIVGTRSNDPVAFALAEMLKVNNTLKSLNVESNFISGSGILALVEALQSNTSLIELRIDNQSQPLGNNVEMEIANMLEKNTTLLKFGYHFTQQGPRLRASNAMMNNNDLVRKRRLAELNGPIFPKCRTGV

SEQ ID NO: 124 - protein, 359 aa, Sus scrofa
MSYRRELEKYRDLDEDEILGALTEEELRTLENELDELDPDNALLPAGLRQKDQTTKAPTGPFKREELLDHLEKQAKEFKDREDLVPYTGEKRGKVWVPKQKPMDPVLETVTLEPELEEALANASDAELCDIAAILGMHTLMSNQQYYQALGSSSIVNKEGLNSVIKPTQYKPVPDEEPNATDVEETLERIKNNDPKLEEVNLNNIRNIPIPTLKAYAEALKENSYVKKFSIVGTRSNDPVAFALAEMLKVNKVLKTLNVESNFISGAGILRLVEALPYNTSLVELKIDNQSQPLGNKVEMEIVSMLEKNATLLKFGYHFTQQGPRLRASNAMMNNNDLVRKRRLADLTGPIIPKCRSGI

SEQ ID NO: 125 - protein, 471 aa, Gallus gallus
MSRRVVRQSKFRHVFGQPVKADQMYEDIRVSKVTWDSSFCAVNPKFVAIIVEAGGGGAFMVLPLAKTGRVDKNHPLVTGHTAPVLDIDWCPHNDNVIASASEDTTVMVWQIPDYVPVRSITEPVVTLEGHSKRVGIICWHPTARNVLLSAGCDNLVILWNVGTGEMLLALEDMHTDLIYNVGWNRNGSLLVTTCKDKKVRVIDPRKQTVVAEITKPHDGARPIRAIFMADGKIFTTGFSKMSERQLGLWDLKNFEEPIALQEMDTSNGVLLPFYDPDTNIVYLCGKGDSSIRYFEITDEAPYVHYLNTYSSKEPQRGMGFMPKRGLDVSKCEIARFFKLHERKCEPIVMTVPRKSDLFQDDLYPDTPGPEPALEADEWLSGKDAEPILISLRDGYVPVKNRELKVVKKNILDSKPPPGPRRSHSTSNTDISTPALDEVLEEIRVLKETVQAQEKRISALEHKLCQFTNGTD

SEQ ID NO: 126 - protein, 962 aa, Gallus gallus
MYFSFMLAGLHRRKEFSLLFPPSIKMRVSVTQEFTEDENENGEEERVFLKPVIEDRNMELARKCSEIISDVHYKEEFEKSKGKCIFVPDTPQLKHVKSVGAFISEVKYKGAAKKDLSNSLYQQMPATIDSAFAKELTQLQSKVLYKQKHDAEKGTSDYAHMKEPPDIKHAMEVNKYQSDVSYKRDVQDTHRYTEVLNRPDIKMATEITKIISDAEYKKGRGEMNKEPAVLGRPDFEHAKGVSKLLSQVKYKEQFKKEMKSHQYNPLDSASFKQAQIASTLASNVNYKKDYKESLHDPASDLPNLLYLNHALNISKMHSDVKYRENYEKSKGKSMLEFVDTPLYQVSKDVQKMQSEKIYRKDFEESLKGRPSLDLDKTPEFLHIKQVTNLLKEKEYRKDLEEWMKGKGMTVFEDTPDLIRVKNAAQILNEKQYKKDLETEIKGKGMQVGPDTPEIRRAKKASEIASTKEYKKDLENEIKGKGMEVGMDTPDIQRAKKASEIVSQKEYRKDLETEIIGKGMQVGPFTPEIQRVKRASEIASQKMYKDEAEKMLCNYSAVPDTPEMERIKSTQKNISSVFYKKVVGAGTAVKETPEIERVKKNQQNISSIKYKEETQHATPISDPPELRRIKENQKNISNVHYKEQLCRATPVSVTPEIERVKRNQENVSMVHYREQPGKATAVSITPEIERVKKNQDNISSVKYSSDQRQMKGRRSVILDTPELRHVKETQNNISMVKYHEDFEKTKGRGFTPVVDDPITERVRKNTQVVSDAAYKGVHPHIVEMDRRPGIIVDLKVWRTDPGSIFDIDPLEDNIQSRSLHMLSERASRYSKQYLHSTSLGDYKSDGSDTNPTFSYCSEITRPSDEGAPVLPGAYQQSQSQGYGYMHQTSMSSMRSVHSQPHPAGLRTYRAMYDYSAQDEDEVSFRDGDYIINVQPIDDGWMYGTVQRTGKTGMLPANYIEFVN

SEQ ID NO: 127 - protein, 1730 aa, Bos taurus
MNVQACSRCGYGVYPAEKINCLDQIWHKACFHCEVCKMMLSVNNFVSYQKKPYCHAHNPKNNTFTSVYYTPLNLNVRKPPEAICGIGGQEDGERFKSVFHWDMKSKDEAAAPNRQPQVDERAYWSGYREGDAWCPGALPDPEIVRMVEARKSLGEEYPEDYEQQRGKGSFPAMITPAYQRAKIANQLASQVEYKRGHDERISRFSTVADTPELLRAKAGGQLQSDVRYTEAYEQQRGKGSFPAMITPAYQIAKRANELASDVRYHQQYQREMKGMAGPAAGAEGPLPKEYMDQYGQGYSEEYGEHRGKGSFPAMITPAYQNAKKANELASDIKYRQDFNKMKGAAHYHSLPAQDNLVLKRAQSVNKLVSEVEYKKDLESSKGHSINYCETPQFRNVCKISKFTSDNKYKENYQNRMRGRYEGVGMDKRMLHALKVGSLASNIAYKADYKHDVVDYNYPATLTPSYQTTVKLAPLKDVNYRQSIDKLKYSSVTNTPQIVQAKINAQQLSHVNYRADYEKNKLNYTLPQDVPQLVKARTNAELFSEVKYREGWEKTKGKGFEMKLDAMSLLAAKASGELASNIKYKEEYEKAKGKVLGTTDSRLLHSLQVAKMSSEVEYKKGFEKSKTHFHLPMDMVNIRHAKKAQALASDLDYRKRLHEYTVLPEDMKTLWAKKAYGLQSELQYKADLAWMKGVRWLTEGSLNLEQAKKAGQLVSEKNYRQRVDELKFTSVADSSQMEHAKKSQELQSGVAYKAEHEQSVHQYSISKDEPLFLQARANAANLSEKLYKSSWENQKAKAFDLRLDSLAFLAAKAKRDLASEVKYKEDYEKSRGKLIGAQGAQGDSQMSHSLQMSKLQSELEYKKGFEDTKSQCHVPLDMIHLVHARKAQHLATDIGYKTASHHFTALPTDMKVEWAKKAYGLQSDNQYRADVKWMKGTGWVATGSLNVEQAKKAGELISEKKYRQHPDALKFTSIKDTPEMVQARISYTQAVDRLYREQGENLKHHYTQTTDLPEVLLAKLNAMNISETRYKESWSKLRDGGYKLRLDAIPFQAAKASGEIISDYKYKEAFEKMKGQMLGSRSLEDDISLAHSVYASSLQSQVNYKKDFEHSKAQFHLPLDMVTLVHAKKAQTLASDQDYRHPLPQYTSLAEDLRLSCAKRAHKLQSENLYRSDLNFMRGVACVIPGTLEIEGRKRASELISESKYRQHPQSLKYTAVTDTPSLTHAKLSNQITNERLYKAAGEDARHQYTMTLGLPEFVRAKTNAANLSDAKYKESWRNLHAQGYKLTIDALPFQAARVSGDIASDFLYRHDFVKERGRLIGAQSVSDDPRLQHCQRVGQLQSELQYRRQAAGSRAQCHLPMDMVPLVHARKAQALASDLDYRTQCHAFTALPEDLRMAWAKKAHALQSELRYKSDLMGMKGTGWLALSSPQIESAKKAGELISETKYREKPDTIKFTTVVDSPDLVHAKNSYMHCNERLYRSGDAESRHRYTLVPDHPDFTRARLNALNLSDKVYRHSWEQTRAGGYDFRLDAIPFQTARASREIASDFRYKEAFLRDRGLQIGYRSINDDPRTKHFLSVGRLQSDNEYKKDFAKSRSQFHSRPDQPGFLQAKRSQQLASDVHYRQPLPQPTCDPEQLGLKHAQKAHRLQSDVKYKSDLNLTRGIGWTPPGSYKVEMARRAAELANARGLGLQGAYGGPEAVEPRDDQSGFVNPDATEILHVKRRKAPLF

SEQ ID NO: 128 - protein, 1736 aa, Gallus gallus
MNVQPCARCGYGVYPAEKINCIDQTWHKACFHCEVCKMMLTVNNFVSHEKKPYCQVHNPKNNAFTSIFETPINLNAKKLSEVVSEVKYREESEQFKSAFQWDVRSRDIEAAYKAQHLSSQNAYYAAYEGGTSWYSGNMPDPQMVTVTQAQKNLNDLQYTEEYELRQGKGSFPAMITPGYQVAKRATQLSSNVEYRRGHEERVSKFTSVVDTPDILHAKAGGQLASDLKYTEDFEEQRGKGSFPAMITPAYQIAKRANELASDVKYHQTYEKEIKGKASHTAGTDVTFTRENVDQYGQDYMNEYEERRGKGSFPAMITPAYQNAKKANELASDIKYKKDLSKMKGAAHFHSLTAEDNLVLKQAQSANKLVSEVEYKKDLGNNRGYSVNYCDTPQFKNVSKISKYTSDIKYKETYQNQMKGHYMGIGMDKRMLHAMKVGNLASNIAYKSDYKHDGVDYNYPATLTPSYQTTRKLVPLKDVNYRQSIDKMKYSSVASTPEIAQAKINAQQLSDLNYRAQYEKTKTNYTLPQDIPQLVKAKANAELYSEVKYKEGWEKSKGQGFEMKLDSLPLLAAKASRDLASDIKYKEEYEKTKGKAIETKDSRLLHSLQVAKMSSEIAYKKDFEESKTHFHLPMDMVNLRHAKKAQALASDLDYRKRLHEYTVVPEDLKTKWAKKAYGLQSDLQYREDLMWMKGVGCITEGSLNIQQAKKAGDLVSEKKYRQKVDALKFTSVADSSHIKHAKKSQELQSDVAYRSGKEQFLHQYTITKDDPVFLLAKANAANISEKLYRSSWEKQKEKGFVLRLDALSFLTAKAKRDLASDIKYKEGYEKMKGKLIGVKAVEEDSKMAHSLQMSKLQSDLEYKKAFEDTKNQFQVSMDMANLVHAKKAQNLASDKGYRTALHHYTVLPTDRKVAWAKWAYGLQSDNRYRADLNWMKGAGWIATGSLNVEQAKKAGELISEKKYRQHPYALKFTSIKDTPEMIQARISYNQAVDRLYKEHGESIKHQYTLTADLPEILRAKLNTMNISEIRYKESWQKMKDGGYQLRLDAIPFQAAKASGEIISDHKYKEAFEKMKGQMIGSCGLDGDIRIAHSVHASSLQSDVKYKQGFEDTKTHFHLPLDMINLVHARKAQSLVSEQEYRQLLHQYTSLTDDLRLQCAKNAYKLQSENLYRSDMNFMRGVGCITPGALEIEGKKKASELISESKYRQQPHSFKYTSVTDSPGLLHAKFSNMIANERLYKAAGEDIQHHYTPTLGLPEFTQARINAANLSDVKYRESWHNLCAQGYKLTMEALPFQTARASREIASDYQYKHNFVMERGKHIGARSVLDDTRLLHCLHAAKLQSEQEYKKGSQGVWSQYYLPMDMVNLVHARKAQALASDQEYRKRLHEFTALPEDLKMKWAKRAHMLQSEHRYKSDLNFMKGVGWMALRSPQIESVKKAGELISETKYRQKPESLKFTAVVDSPDLIHAKNSYLQCNDRLYKAGDSEARHRYTLPPDHPDFIRARQNALNISDKVYKTSWEQTRASGYDFRIDAIPFQTAKASREIASDYKYREAFLRDRGQRIGFFSANDDAHTRHVLRVGKLQSDNLYRSGYAQNRGHFQSHLNQPGFLHAKRSQQLASNVNYKQPLHQYTCDPEQLNVKHAKQAYKLQSDVKYKSDLNWLRGIGWTPPGSYKVERARRAAELAYLREMGLQAASAQYGPEADQVGPEGSQQVTVNPDASEILQVKRRKMQLYK

SEQ ID NO: 129 - protein, 399 aa, Bos taurus
MTSYSYRQSSSTSSFGGMGGGSMRFGAGGAFRAPSIHGGSGGRGVSVSSARFVSSSSGGYGGGYGGALATSDGLLAGNEKLTMQNLNDRLASYLEKVRALEEANGDLEVKIRDWYQKQGPGPARDYSHYFKTIEDLRDQILGATIENSKIVLQIDNARLAADDFRTKFETEQALRMSVEADINGLRRVLDELTLARTDLEMQIEGLKEELAYLKKNHEEEMSVLKGQVGGQVSVEVDSAPGIDLAKILSDMRSQYEVIAEKNRKDAEAWFISQTEELNREVAGHTEQLQISKTEVTDLRRTLQGLEIELQSQLSMKAALEGTLAETEARFGAQLAQIQALISGIEAQLSDVRADTERQNQEYQHLMDIKTRLEQEIATYRNLLEGQDAYFNDLSLAKAL

SEQ ID NO: 130 - protein, 1467 aa, Bos taurus
MSLVAVPFYQKRHKHFDQSYRNIQTRYLLDEYSAKKKRASAQSSLQRSVTRKSSSQRESSRAALGRTTCRLCAKRMSSALEEEAQERKRRYQSMVAAYGEAKRERYLSELAQLEEDVHVARTHARDQLDRLALQHAVDDRLAWERHSFEERISRAPEILVRLRSHTVWERMSVKLCFTVQGFPTPVVQWYKDGSLICQAGEPGKYRIDSKYGVHTLEINRADFDDTATYSAVATNVHGQVSTNAAVVVRRFRGDEEPFHSVGLPIGLPLSSVIPYTHFDVQFIEKFGVTFRREGETLTLKCTLLVTPDLKRVQPRAEWYRDDVLLKESKWTKMFFGEGQASLSFSHLNKDDEGLYTLRIVSRGGITDHSAFLFVRDADPLVTGAPGAPMDVHCHDVNRDYVIVTWKPPNATKESPVIGYFIDRCEVGTDNWIQCNDAPVKICKYPVTGLFEGRSYIFRVRAVNSAGISRPSRVSEAVAALDPVDLRRLQAVHLEGEKDIVVYQEELEGEVQIPGPPTNVHASETSRTYVVLSWDPPEPRGKEPLMYFIEKSMVGSGSWQRVNAQTAVRSPRYAVFDLAEGKPYVFRVLSANKHGLSDPSEITAPIQAQDTIVVPSAPGRVLASRNTRTSVVVQWDRPKHEEDLLGYYVDCSVAGSNVWEPCNHKPIGYNRFVVHGLTTGEQYIFRVKAVNAVGTSENSQESDVIKVQAALTVPSHPYGITLLNCDGHSMILGWKVPKFSGGSPILGYYVDKREAHHKNWHEVNSSPLKERILTVEGLTEGSLYEFKIAAANMAGIGQPSDPSELFKCEAWTMPEPGPAYDLTFCEVRDTSLVLLWKPPVYSGSSPVSGYFVDYKEEDSGEWLTVHETATPHRYLKVCDLHQGKTYVFRVRAVNASGVGRPSDTSEPVLVEARPGTKEVSAGVDEEGNVYLSFDCPEVTDASHFTWCKSYEDIADDDRFKVETAGDHSKLYFKNLDKEDLGTYSVSVSDTDGVSSSFVLDEEELERLKALSNEIKNPTIPLKSELAYEIFDKGQVRFWLQAEHLSPDSSYRFIINDREVADSETHRIKCDKSTGIIEMVMDRFTIDNEGTYTVQIQDGKAKSQSSLVLIGDAFKAVLKEAEFQRKEFLRKQGPHFAEYLHWDVTEECEVRLVCKVANTKKETVFKWLKDDVLYETEKMPDLEKGVCELLIPKLSKKDHGEYKATLKDDRGQDVSTLEIAGKVYEDMILAMSRVCGASASPLKILCTPEGIRLQCFMKYFTEEMKVNWYHKDAKITSSEHMRIGGNEQMAWLQICEPTEKDKGKYTFEILDGKKNHQRSLDLSGQAFDEAFAEFQQLKAAAFAEKNRGKVIGGLPDVVTIMEGKTLNLTCTVFGNPDPEVVWFKNDKDIELSDHFSVKVEQGKYVSMTIKGVTSEDSGKYSIHVKNKYGGEKIDVTVSVYKHGEEIPDVVLPQQAKPKLLPAAAPSPAH

SEQ ID NO: 131 - protein, 1320 aa, Bos taurus
MQDDSLEASTSISQLLRESYLAETRHRGNNERSRAEPSSNPFHFGGSSGAAEGGGGQDDLPDLSAFLSQEELDESVNLARLAINYDPLEKADEAQARKRFSSDQTKHSSISSFDPNFCQDNSQSPTNSKESLQETKRPQYSSEAQSKKVFLNKAADFIEELSSLFKAHSSKRIRPRACKNHKSKLESQNQVMQENSSSFPDLSERRERSSVPIPIPADTRDNEVNHALEQQEAKRREAEQAAGEAASGDTTPGSSPSSLYYEEPLGQPPRFTQKLRSREVPEGTRVQLDCIVVGIPPPQVRWYCEGKELENSPDIHIIQAGNLHSLTIAEAFEEDTGRYSCFASNIYGTDSTSAEIYIEGVSSSDSEGDPNKDEMNRIQKPNEVSSPPTTSAGIPSAVPQTQHVVVQPRVSTIQQCQSPTNYLQGLDGKPIIAAPVFTKMLQNLSASEGQLVVFECRVKGAPSPKVEWYREGTLIEDSPDFRILQKKPRSMAEPEEICTLVIAEVFAEDSGCFTCTASNKYGTVSSIAQLDVRGNEDLRNNGSLHSANSTTNLALTEQQPSPPNPEPPVEQPPKPKLEGVLVNHNEPRSSSRIGLRVHFNLPEDDKGSEESSEGGVVTTHQTRPDSFQERFNGQSAKISEPSSPVKEPPPVLAKPKLDSSQLQQLHNQVLLEQHHLQNPSPSSPKEFPFNMSVLNSTTVPAVTVSSKHAKAPPSQTFSLARPKHFFPSTSTTVASVSPSSSPVFTLSSTPQAMQRTMSKESLLVTHPSAQTKSLGGASIQNEPLPTPAPTEPAQLPLTFSISSGNQFQPRCVSPAPVSPTGRIQNPVAFLSSVLPSLPAIPPTNAMGLPKSAPSMPSQGLMKKNTKSSHPVSDDYIRETKNAVILDLGKKMNFSDVRSNQQEYKISSFEQRLMNEIEFRLERTPVDESDDEIQHDEIPTGKCIAPIFDKRLKHFRVTEGSPVTFTCKIVGIPVPKVYWFKDGKQISKRNEHFKMKREGDGTCSLHINSTSSDDDGNYTIMAANPQGRISCSGHLMVQGLPIRSRLTAAGQSHRGRSRVQERDKEPLQERFFRPHFLQAPGDMVAHEGRLCRLDCKVSGLPPPELTWLLNGQPVLPDTSHKMLVRETGVHSLLIDPLTQRDAGTYTCIATNKTGQNSFSLELTVVAKEVKKAPVILEKLQNSGVPEGHPVRLECRVIGMPPPVFYWKKDNETIPFTRERISMHQDTTGYVCLLIQPAKKSDAGWYTLSAKNEAGIVSCTARLDIYAQWHHQIPPPMTVRPSGSRYGSLTSKGLDIFSAFSSMESTMVYSCSSRSVVESDEL

SEQ ID NO: 132 - protein, 264 aa, Bos taurus
MLSHNTMVKQRKQQASAIMKEIHGNDVDVMHLGKKVSIPRDIMLEELSHLSNRGARLFKMRQRRSDKYTFENFQYETKAQINHNIAMQNEKLDGINLESGSQQAPFTPPNTPDPRSPPNPENIAPGYSGPLKEIPPERFNTTAVPKYYQSPWEQAISNDPELLEALYPKFFKPEGKAELPDYRSFNRVATPFGGFEKASKMVKFKVPDFDLLLLTDPRFMAFANPLSGRRSFNRTPKGWISENIPIVITTEPTEDNTIPESEDL

SEQ ID NO: 133 - protein, 263 aa, Gallus gallus
MLSHSAMVKERKQQASAIMDEIQRNVSPSLNLGKKVSTPRDIMVEELSTLSNRGARLFKRRQRRSDKYTYENYHYVANKPRNRGEPIHSVKMDGLSVEGIPQHAPMTPPNTPDPRSPPHPDNIAPGYSGPLKEIPPEKFNTTSVPKYYQSPWIEAIRDDPELLEALYPKLFKPEAKPELPDYRSFNRVATPFGGFERASKLVKFKVPDYNLLMLNDPRFMILANPLATRRSFNRTPKGWTSENIPVVFIQPSDSNNVPETEDL

SEQ ID NO: 134 - protein, 264 aa, Sus scrofa
MLSHNTMVKQRKQQASAIMKEIHGNDVDGMDLGKKVSIPRDIMLEELSHLSNRGARLFKMRQRRSDKYTFENFQYESKAQINHNIAMQNGKLDGNNLESGSQQAPFTPPNTPDPRSPPNPENIAPGYSGPLKEIPPERFNTTAVPKYYQSPWEQAISNDPELLEALYPKLFKPEGKAELPDYRSFNRVATPFGGFEKASKIVKFKVPDFELLLLTDPRFMAFANPLSGRRSFNRTPKGWISENIPIVITTEPTEDTTIPESDDL

SEQ ID NO: 135 - protein, 479 aa, Bos taurus
MASPEPRRGGNGSAQAARATRPEVISPLQEENSASLYELGTWNPEVTLSLEGTLNLEDILYLGDTGDLDEALYVEETEPPEETLHIEETRMPDEALYLEEPVRPEAALYVEEPVKLEGVLYVEEPVKTASPEQIVHGGDRVLSEAKSKPKESLQAGPSPSTEGSLSIEDLELLEGRFQQCIEAVAQLEEERDQLIHELVLLREPALQEVQQVHRDILAAYKQHAQAELERDGLREEIRLVKQKLFKVTKECVAYQYQLECRRQDVAQFADFREALTTRAAQLSEELTQLREAYQKQKEQLRQQLEAPQSQRDGHFLQESRRLSAQFESLMAESRQGLEEEYEPQLLRLLERKEAAAKALQKTQAEIQEMKEALRPLQAEAQKLHLQNRNLEDQITLVRQKRDEEVQQYREQLEEMEERQRQLRSGVQLQQQKNKEMEQLRVSLAEELATYKAMLPKSLEQANAPTSEAGGIETPSQGAV

SEQ ID NO: 136 - protein, 323 aa, Gallus gallus
MDAEGAGTPQAPEGTERPCLSLEELGEYFQECIEAVEQLEKERDALIEELTQLREPALQDIRHAHQEIQAACRLLAKVELERDNLRDEIRQIKQKLFKVTKECVACQYQLESRRHDLSQHAAYRDELESQAGRLTGELSRLRESCEKEKEALRQRLEAPPCRQDPQYLQESRRLSAEFESLVTRSRRGLEEHYEPQLLRLLERREAGTRALQELQGEVQGMKEALRPLQGEVSRLRLQNRSLEEQIVLVKQKRDEEVGQYREQVEELEDRLKELKNSVQLQQRKNQELEELRSSLHHELSIYKGCLEIYGHLCKSEEKPDQEC

SEQ ID NO: 137 - protein, 482 aa, Sus scrofa
MASPEPRRGGDGAAQAARETRAEATSPLQEGNSESLYQLGTWNPEVTLSLEGTLNLEDILYLGDPVDLDEALYVEETEKPEETLHIEETRLPDEALYVEEPVKPEEMLYVEETVKPEEIVCVEQTMKPGETTSPEPITYGGETVPSEEKPNPEESLRAKPNPSTDGSLSLEDLELLEGRFQQCVQAVAQLEEERDQLIHELVLLREPALQEVQQVHQDILAAYKLHAQAELERDGLREEIRLVKQKLFKVTKECVAYQYQLECRRQDVAQFADFREVLTARAAQLSEELAQLRDAYQKQKEQLRQQLEAPPSQRDGHFLQESRRLSARFENLMAESRQGLEEEYEPQLLRLLERKEAAAKALQKTQAEIQEMKEALRPLQAEARQLHLQNRNLEDQITLVRQKRDEEVQQYREQLEEMEERQRQLKSGVQLQQQKNKEMEQLRISLAEELSTYKAMLPKSLERASAPTSEAGGIETQSQGAV

SEQ ID NO: 138 - protein, 388 aa, Bos taurus
MAAALIWISLLVGLLEGLGGTEAQQTTLHPLVGRVFVHTLDHESFLQRPEHVFSVSAPIPITYHAHLQGHPDLPRWLRYTQRSPYQPGFLYGTATPEDRGHQIIEVTAYNRDSFNTTQQMLVLLIGDPEGPLLPYQAEFLVRSHDVEEVLPSIPASRFLTALGGLWEPAELQLVNITSALDRGGRVPLPIEGRKEGVYIKVGSASPFSTCLKMVVSPDSHARCAQGQPPLLSCYDTLAPHFRVDWCNVSLVDKSVPEPADEAPAPGDGILEHDPFFCPPTEATNRDFLTDALVTLLVPLLVALLLTLLLAYVMCCRREGRLKRDLATSDIQMVHHRTIRGNTEELRQMASSREVPRPLSTLPMFNVHTGERLPPQVDSAQVPLILDQH

SEQ ID NO: 139 - protein, 291 aa, Bos taurus
MVREQYTTITEGTHIERPENQAVYKIGIYGWRKRCLYLFVLLLLIVLLVNFALTIWILRVMWFSPVGMGHLHVTADGLHLEGESEFLFPLYVKEIRSRVDSSLLLQSTQNVTMNARNTEGEVTGRLKVGPQMVEVQSQQFQIHSKDGKPLFTVDEEKVMVGTDKLRVTGPEGALFEHSVETPLVRPDPPQDLRLESPTRSLSMDAPKGIHIQAPAGKIEALTQMDIVLQSSDGTVVLDAETVCLPELALGSQGPAGSSQGLYEVCVCPDGKLYLSVAGMGTTCHEHSHLCL

SEQ ID NO: 140 - protein, 1135 aa, Gallus gallus
MPVFHTRTIESILEPVAQQISHLVIMHEEGEVDGKAIPDLTAPVSAVQAAVSNLVRVGKETVQTTEDQILKRDMPPAFIKVENACTKLVRAAQMLQADPYSVPARDYLIDGSRGILSGTSDLLLTFDEAEVRKIIRVCKGILEYLTVAEVVETMEDLVTYTKNLGPGMTKMAKMIDERQQELTHQEHRVMLVNSMNTVKELLPVLISAMKIFVTTKNTKSQGIEEALKNRNFTVEKMSAEINEIIRVLQLTSWDEDAWASKDTEAMKRALALIDSKMNQAKGWLRDPNAPPGDAGEQAIRQILDEAGKAGELCAGKERREILGTCKTLGQMTDQLADLRARGQGATPMAMQKAQQVSQGLDLLTAKVENAARKLEAMTNSKQAIAKKIDAAQNWLADPNGGSEGEEHIRGIMSEARKVAELCEEPKERDDILRSLGEISALTAKLSDLRRHGKGDSPEARALAKQIATSLQNLQSKTNRAVANTRPVKAAVHLEGKIEQAQRWIDNPTVDDRGVGQAAIRGLVAEGRRLANVMMGPYRQDLLAKCDRVDQLAAQLADLAARGEGESPQARAIAAQLQDSLKDLKARMQEAMTQEVSDVFSDTTTPIKLLAVAATAPSDTPNREEVFEERAANFENHAARLGATAEKAAAVGTANKTTVEGIQATVKSARELTPQVVSAARILLRNPGNQAAYEHFETMKNQWIDNVEKMTGLVDEAIDTKSLLDASEEAIKKDLDKCKVAMANMQPQMLVAGATSIARRANRILLVAKREVENSEDPKFREAVKAASDELSKTISPMVMDAKAVAGNISDPGLQKSFLDSGYRILGAVAKVREAFQPQEPDFPPPPPDLEHLHLTDELAPPKPPLPEGEVPPPRPPPPEEKDEEFPEQKAGEAINQPMMMAARQLHDEARKWSSKPVTVINEAAEAGVDIDEEDDADVEFSLPSDIEDDYEPELLLMPTNQPVNQPILAAAQSLHREATKWSSKGNDIIAAAKRMALLMAEMSRLVRGGSGNKRALIQCAKDIAKASDEVTRLAKEVAKQCTDKRIRTNLLQVCERIPTISTQLKILSTVKATMLGRTNISDEESEQATEMLVHNAQNLMQSVKETVREAEAASIKIRTDAGFTLRWVRKTPWYQ

SEQ ID NO: 141 - protein, 449 aa, Bos taurus
MEQKAGKSSEDGATVPPAAEAPEPAGSGGSAEEETAGPAESAARAGPATAGQQERAPAEDAVSAECQADGLGEVKAESQGEVELQQEDPGQGETAAAHGKTDRKDQTDSEPEGAEGDRETASASEEQSADEKEARLGSRETVDASREVQAEPKQASGAQEAEAGGGEAEGPQEEGGKTEEPQAEAREEAGAPAAQPDSEPGSPDEEQDQGAGAEAEDGAGGPPSSPEGWPESPTEEGGSASPEGLSPDTAASEELGPSASDSSPSDVPQSPTEPPPSEEKKKEKAPERRVSAPTRPRGPRAQNRKAIVDKFGGAAAGPTALFRNTKAAGAAVGGVRNMLLEWCRAMTRSYEHVDIQNFSSSWGSGMAFCALIHKFFPDAFDYAALDPAQRRHNFTLAFSTAEKLADCAQLLEVDDMVRLAVPDSKCVYTYIQELYRSLVQKGLVKTKKK

SEQ ID NO: 142 - protein, 315 aa, Gallus gallus
MPQNVILPGPAPWGFRLSGGIDFNQPLIITRITPGSKASTANLCPGDIIVAINGLSTENMTHNDAQERIKAAAHQLSLRIERAETKLWSPQVSEDGKANPYKINLEAEPQEFKPIGTAHNRRAQPFVAAANIDDKRQVVSSSYNSPIGLYSSGNIQDALHGQLRSLIPNASQNDPAPTAVPQSDVYRMLHSNQEEPSQPRQSGSFKVLQNLVSEEDGRPVGTRSVKAPVTKIPTGLPGAQKVPQCDKCGSGILGTVVKARDKYRHPECFVCSDCNLNLKQKGYFFVEGQLYCETHARARMRPPEGYEAVTVYPKC

SEQ ID NO: 143 - protein, 1744 aa, Gallus gallus
MDFGSVMNQAATPCSPAVNYELPSPGQSITKQVDTPDATRSPRGGQAHCKASRSMSVTAAMESSCELDLVYITERIIAVSYPSTAEEQSFRSNLREVAHMLKSKHGDNYVLFNLSERRHDISKLHPKVLDFGWPDLHTPALEKICSICKAMDTWLNAAAHNVVVLHNKGNRGRLGVVVAAYMHYSNISASADQALDRFAMKRFYEDKVVPVGQPSQKRYIHYFSGLLSGSIKMNNKPLFLHHVIMHGIPNFESKGGCRPFLKIYQAMQPVYTSGIYNVQGDSQTGICITIEPGLLLKGDILLKCYHKKFRSPTRDVIFRVQFHTCAVHDLDIVFGKEDLDEAFRDERFPEYGKVEFVFSYGPEKIQGMEHLENGPSVSVDYNTSDPLIRWDSYENFNIQREDSAEGTWAEPALPGKHLEKEVGHTQGPLDGSLYAKVKKKDSLHGSIGAVNTARLPLSAAPNHVEHTLSVSSDSGNSTASTKTDRTDEPGAPGAPTGHAVLSPEEKRDVDRLLVGFGLESAAPMHNHAPGPAPARLPAGPGRHVVPAQVHVNGAGTPLLAERETDILDDELPNQDGHSVGSLGTLSSLDGTTTASEAGFHEAPRVGSLSSLPNGPASYNGAEKMLKEGLYEAEPLSNGAYPYSNQNTLMGHHLRDPLAHLRPSRSAQEHLAGYPQRQPASASPAWLQPPVPQPYLYGYDLPSAHRSQSFPAVGTAKYEANLALPQAPARSTSSREAVQRGLNSWQQQGGSRPPSQLHDGGLESHSPSLSSCSPQPSPLQPMPPHSHSMPEFPRAPSRREIEQSIEALDVLMLDLAPSVHKSQSVPSAATRQDKPAAMLSSLSAQRLSGHYAQPTPQVVQPRSFGTSVGTDPLAKPYSPGPLVPAARSTAEPDYTVHEYRETYTPYSYQPVPEPRSYGSAPASILPLSASYSPAGSQQLLVSSPPSPTAPAQSQLPHKGLESYEDLSRSGEEPLNLEGLVAHRVAGVQSREKSPEESTVPARRRTPSDSHYEKSSPEPGSPRSPTVLSPEVVSTIAANPGGRPKEPHLHSYKEAFEEMESASPSSLTSGGVRSPPGLAKTPLSALGLKPHNPADILLHPVGELEGEAGADSEEEPRSYVESVARTATTGRAGNLPAAQPVGLEVPARNGAFGNSFTVPSPVSTSSPIHSVDGASLRSYPSEGSPHGTVTPPHAVAETAYRSPMVSQTPSAHSSYQTSSPSSFQAGTLGSPYASPDYPDGRGGFQPDPQARQQPQVSVVGVHALPGSPRTLHRTVATNTPPSPGFGRRAANPAVASVPGSPGLGRHTVSPHAPPGSPSLARHQMAAVPPGSPMYGYSSPEERRPTLSRQSSASGYQPPSTPSFPVSPAYYPGTSTPHSSSPDSAAYRQGSPTPQPALPEKRRMSAGERSNSLPNYATVNGKASSPLSSGMSSPSSGSAVAFSHTLPDFSKFSMPDISPETRANVKFVQDTSKYWYKPDISREQAIALLKDREPGAFIIRDSHSFRGAYGLAMKVASPPPTVMQQNKKGDITNELVRHFLIETSPRGVKLKGCPNEPNFGCLSALVYQHSIMPLALPCKLVIPDRDPMEEKKDAASTTNSATDLLKQGAACNVLFINSVEMESLTGPQAISKAVAETLVADPTPTATIVHFKVSAQGITLTDNQRKLFFRRHYPLNTVTFCDLDPQERKWTKTDGSGPAKLFGFVARKQGSTTDNVCHLFAELDPDQPAAAIVNFVSRVMLGSGQKR

SEQ ID NO: 144 - protein, 833 aa, Gallus gallus
MSEVGEEQNGGRGAGLGGITAALGLVLIPIPIPILVPVPIPIPIPIPPPQGRKGQSRHRALAGAGPGWGGVRAVTAPGAARCARPRAPQLRPARPERQQQPVSMVEHAEFSKAGKEPGLQIWRIEKFDLVPVPKNLYGDFFTGDSYLVLNTIRQRSGNLQYDLHFWLGDESSQDERGAAAIFTVQMDDYLQGKAVQHREVQGHESSTFLGYFKSGIKYKAGGVASGFRHVVPNEVTVQRLLQVKGRRTVRATEVPVSWESFNTGDCFILDLGSNIYQWCGSNSNRQERLKATVLAKGIRDNERNGRAKVFVSEEGAEREEMLQVLGPKPSLPQGASDDTKTDTANRKLAKLYKVSNGAGNMAVSLVADENPFSQAALNTEDCFILDHGTDGKIFVWKGRSANSDERKAALKTATDFIEKMGYPKHTQVQVLPESGETPLFKQFFKNWRDKDQTEGLGEAYISGHVAKIEKVPFDAATLHTSRAMAAQHGMEDDGSGKKQIWRIEGSEKVPVDPATYGQFYGGDSYIILYDYRHAGKQGQIIYTWQGAHSTQDEIATSAFLTVQLDEELGGSPVQKRVVQGKEPPHLMSMFGGKPLIVYKGGTSREGGQTTPAQTRLFQVRSSTSGATRAVELDPVASQLNSNDAFVLKTPSAAYLWVGRGSNSAELSGAQELLKVLGARPVQVSEGREPDNFWVALGGKAPYRTSPRLKDKKMDAHPPRLFACSNKSGRFTIEEVPGDLTQDDLATDDVMILDTWDQVFVWIGKDAQEEEKTEALKSAKRYIETDPASRDKRTPVTLVKQGLEPPTFSGWFLGWDDDYWSVDPLQRAMADVDV

SEQ ID NO: 145 - protein, 896 aa, Gallus gallus
MTVGCVPQPPFLGRTLLPVLLLAASARCHWPSEPAEVVRDWENQLEASMHSVLSDLRETVPAVVGIPDSSAVVGRFFRVSIPTDLIASNGEAVQVSEAGKESLPSWLHWNAESSSLEGLPLDTDKGVHYISVTTLQPFPNGSYVPQAANVFSVEVHQEDHSEPQSVRAAAQEAGDAAPFVCGAEEPVTILTVILDADLTKMTPKQRIELLNRMRSFSEVELHNMKLVPVVNNRLFDMSAFMAGPGNAKKVVENGALLSWKLGCSLSQNSVPNISKVEAPAKEGTMSARLGYPVVGWHIANKKPHLPKRMRRQINATPTPLTAIGPPTTAAQEPPTRIVPTPTSPAIAPPTETTAPPVREPIPLPRKPTVTIRTRGPIVQTPTLGPIQPTRLVEGTGTVSVPIRPTVPGYVEPTAVITPPTTTTKKPRVSTLKPATPSTTDSSTATTRRPTRRPKTPRPTKPPSTTRSTISKLTTASPPTRVRTTASGVPRPWEPNEPPKLTNHIDRVDAWEGTYFEVKIPSDTFYDKEDTTTDKLQLTLKLKEQQMIEENSWVQFNSTSQLMYGMPDRSHVGKHEYFMYATDKGGLFAVDAFEIHVHKRPHGDKSPVKFKARLEGDHSAVANDIHKKIMLVKKLALAFGDRNSSTITVQDIAKGSIVVEWTNNTLPLEPCPREQIRTLSKKIADDSGGPSPAFSNILQPEFKPLNVSVVGSGSCRHIQFVPVTKDGRVISEATPTLAAGKDPEKSSEDDVYLHTVIPAVVVAAILLVAGIIAMICYRKKRKGKLTIEDQATFIKKGVPIIFADELDDSKPPPSSSMPLILQEEKAPLPPPEYPNQSMPETTPLNQDTIGEYTPLRDEDPNAPPYQPPPPFTAPMEGKGSRPKNMTPYRSPPPYVPP

SEQ ID NO: 146 - protein, 1066 aa, Gallus gallus
MPVFHTRTIESILEPVAQQISHLVIMHEEGEVDGKAIPDLTAPVSAVQAAVSNLVRVGKETVQTTEDQILKRDMPPAFIKVENACTKLVRAAQMLQADPYSVPARDYLIDGSRGILSGTSDLLLTFDEAEVRKIIRVCKGILEYLTVAEVVETMEDLVTYTKNLGPGMTKMAKMIDERQQELTHQEHRVMLVNSMNTVKELLPVLISAMKIFVTTKNTKSQGIEEALKNRNFTVEKMSAEINEIIRVLQLTSWDEDAWASKDTEAMKRALALIDSKMNQAKGWLRDPNAPPGDAGEQAIRQILDEAGKAGELCAGKERREILGTCKTLGQMTDQLADLRARGQGATPMAMQKAQQVSQGLDLLTAKVENAARKLEAMTNSKQAIAKKIDAAQNWLADPNGGSEGEEHIRGIMSEARKVAELCEEPKERDDILRSLGEISALTAKLSDLRRHGKGDSPEARALAKQIATSLQNLQSKTNRAVANTRPVKAAVHLEGKIEQAQRWIDNPTVDDRGVGQAAIRGLVAEGRRLANVMMGPYRQDLLAKCDRVDQLAAQLADLAARGEGESPQARAIAAQLQDSLKDLKARMQEAMTQEVSDVFSDTTTPIKLLAVAATAPSDTPNREEVFEERAANFENHAARLGATAEKAAAVGTANKTTVEGIQATVKSARELTPQVVSAARILLRNPGNQAAYEHFETMKNQWIDNVEKMTGLVDEAIDTKSLLDASEEAIKKDLDKCKVAMANMQPQMLVAGATSIARRANRILLVAKREVENSEDPKFREAVKAASDELSKTISPMVMDAKAVAGNISDPGLQKSFLDSGYRILGAVAKVREAFQPQEPDFPPPPPDLEHLHLTDELAPPKPPLPEGEVPPPRPPPPEEKDEEFPEQKAGEAINQPMMMAARQLHDEARKWSSKGNDIIAAAKRMALLMAEMSRLVRGGSGNKRALIQCAKDIAKASDEVTRLAKEVAKQCTDKRIRTNLLQVCERIPTISTQLKILSTVKATMLGRTNISDEESEQATEMLVHNAQNLMQSVKETVREAEAASIKIRTDAGFTLRWVRKTPWYQ

SEQ ID NO: 147 - protein, 1822 aa, Gallus gallus
MKRKERIARRLEGIENDTQPMLLQNCPGSVTHRLLEEDTPRYMRATDPYSHHLGRSNEEEEASDSSVEKQPRSSRYRTETTGGNTESLYSTGNMDTHELESKAERIARYKAERRRQLAEKYGLSLDSDLDSDYSSRYSRARKDPDSVERKALRSERHDDENKDSGSLYLSRTEVKESKSVLSESREYSSREKDGIPAKEELSNEKSDKRADDDSAIRQASDPSATLDSSVSLTLSGRESSSCNEVPISPKQSPRESLSSPKRAASPIHLQNDQPLHSNIRQSESRFEMSTSGSALSAGGDRERGPRRPRRYFTPGENRKTSERFKTQPITSAERKETDRSIMCAEIPTADDEEKLDDRAKLSVAAKRLLFREMEKSFEMKNIPKPPTRSSAVERRMRRLQDRSHTQPITSEEVVIAATLQASAHQKILAKEEIRAAKEAMGQDQSDEPDSSTLSLAEKMALFNKLSQPVSRAISTRSRGDIRHRRMNTRYQTQPVTLGEVEQVQNESGKLTPLSSTVSTSVSAMASALSALFAGDMHAKSRSDGSVSAATKDELRFHASAESSDSSGKRTQKSEQWQPSMEVLESKRASKKHEEEGKRFLAHEANEIRKYSSFEDETTHPVLEKTGDYHKEAAYSFLRKGSMELFSSQPLFQPLERKEIDTIMQDHVEPTSELTSTPATRTLSQTTAAASCRLQELSEQLEGKFYKNSCEMFSAGENKIQTTEDATDSSSKTMSIKERLALLKKSGEEDWKSRLSKKQEYAKVSATDRSAQMQEVEQLLKKRIADNQESQMTIEERKHLITAREEAWKSRGKGAANDSTQFTVAGRMVKKGLASPSALTPVASPYGNRQKSTTPVTKPLEEIEARPDMQLESDMKLDKLESFLGRLNNKVAGMQETVLTVTGKSVKEVMKLDDDETFSKFYRRVDFPSSSVPLDLDEDFDAIFDPYAPKLISSVAEHKRAVRPMRRVQSSRNPLKMLAAREDILHEYTEQRLNVAFMESKRMKVEKMSANSNFSEVALAGLASKENFSNVSLRSVNLTEQNSNNSAVPYKKLMLLQIKGRRHVQTRLVEPRASSLNSGDCFLLLTPHLCFLWVGEFANVIEKAKASELATLIQTKRELGCRASYIQTIEEGINTHTHAAKDFWKLLGGQANYQSAGRPEEDEMYEAAIIETNCIYRLVEDKLIPEDDYWGKMPKCTLLQPKEVLVFDFGSEVYVWHGKEVTLAQRKVAFQLAKHLWNGTFDYSNCDINPLDPGECNPLIPRKGQGRPDWAVFGRLTEHNETILFKEKFLDWTELKKLNEKNSSESLHQKEESKSDSKPYDVMLMVPVPQTAVGTVLDGMNIGRGYGLVEGEDGRQFEIITASVDVWHILEFDYSRLPKQSIGQFHEGDTYVVKWKYMVSTTVGSRQKGEQQVRAVGKEKCVYFFWQGRHSTVSEKGTSALMTVELDEERGAQVQVLQGKELPCFLQCFQGGMIVHAGRREEEEENAQSDWRLYCVRGEVPNEGNLLEVACHCSSLRSRTSMIVLNINKALIYLWHGCKAQSHTKDVGRTAANKIKEQCPLEAGLHSSSKVTIHECDEGSEPLGFWDALGRRDRKAYDCMLQDPGKFNFTPRLFSLSSSSGEFSATEYVYPSRDPTVINSMPFLQEDLYTAPQPALFLVDNHHEVYLWQGWWPVENKITGSARIRWATDRKCAMETVLQYCKGKNVKKPPKSYLIHAGLEPLTFTNMFPSWEHREDIAEITEMDADVSNQIILVEDVLAKLCKTVYPLADLLARPLPEGVDPLKLEIYLSDEDFEVALEMTREEYNALPSWKQVNLKKAKGLF

SEQ ID NO: 148 - protein, 140 aa, Gallus gallus
MAGWQSYVDNLMCDGCCQEAAIVGYCDAKYVWAATAGGIFQSITPVEIDMIVGKDREGFFTNGLTLGAKKCSVIRDSLYVDGDCTMDIRTKSQGGEPTYNVAVGRAGRVLVFVMGKEGVHGGGLNKKAYSMAKYLRDSGF

SEQ ID NO: 149 - protein, 361 aa, Bos taurus
MEHNGSASNADKIHQNRLSNVTEDEDQDAALTIVTVLDKVAAIVDSVQASQKRIEERHRVMENAIKSVQIDLLKFSQSHSNTGYVINKLFEKTRKVSAHIKDVKARVEKQQTHVKKVEAKQEEIMKKNKFRVVIFQEEVQCPTSLSVVKDRSLTESPEEVDEIFDTPVDLSSDEEYFVEESRSARLKKSGKERIDNIKKAFSKENMQKTRQNFDKKVNRIRTRIVTPERRERLRQSGERLRQSGERLKQSGERFKKSISNAAPSREAFKMRSLRKTKDRAVAEGPEEVREMGVDIIARGEALGPISELYPEALSETDPEEASATHPPQEGGEVSTPEPLKVTFKPQVKVEDDESLLLDLKQ

SEQ ID NO: 150 - protein, 1667 aa, Mus musculus
MSLPFYQRSHQHYDLSYRNKDLRTTMSHYQQEKKRSAVYTHGSTAYSSRSLAARRQESEAFSQASATSYQQQASQTYSLGASSSSRHSQGSEVSRKTASAYDYGYSHGLTDSSLLLEDYSSKLSPQTKRAKRSLLSGEETGSLPGNYLVPIYSGRQVHISGIRDSEEERIKEAAAYIAQKTLLASEEAIAASKQSTASKQSATSKRTTSTLQREETFEKKSRNIAIREKAEELSLKKTLEETQTYHGKLNEDHLLHAPEFIIKPRSHTVWEKENVKLHCSVAGWPEPRLTWYKNQVPINVHANPGKYIIESRYGMHTLEISKCDFEDTAQYRASAMNVQGELSAYASVVVKRYKGELDESLLRGGVSMPLSFAVTPYGYASKFEIHFDDKFDVSFGREGETMSLGCRVVITPEIKHFQPEVQWYRNGAPVSPSKWVQPHWSGDRATLTFSHLNKEDEGLYTIRVRMGEYYEQYSAYVFVRDADAEIEGAPAAPLDVVSLDANKDYIIISWKQPAVDGGSPILGYFIDKCEVGTDTWSQCNDTPVKFARFPVTGLIEGRSYIFRVRAVNKTGIGLPSRVSEPVAALDPAEKARLKSHPSAPWTGQIIVTEEEPTEGVIPGPPTDLSVTEATRSYVVLSWKPPGQRGHEGIMYFVEKCDVGAENWQRVNTELPVKSPRFALFDLVEGKSYRFRVRCSNSAGVGEPSETTEVTVVGDKLDIPKAPGKIIPSRNTDTSVVVSWEESRDAKELVGYYIEASVVGSGKWEPCNNNPVKGSRFTCHGLTTAQSYIFRVRAVNAAGLSEYSQDSEAIEVKAAIGGGVSPDVWPQLSDTPGGLTDSRGGMNGASPPTSQKDALLGSNPNKPSPPSSPSSRGQKEVSTVSESVQEPLSSPPQEAAPEEEQSQSEPPKKKKDPVAVPSAPYDITCLESFRDSMVLGWKQPDTTGGAEITGYYVNYREVVGEVPGKWREANIKAVSDAAYKISNLKENTLYQFQVSAMNIAGLGAPSTVSECFKCEEWTIAVPGPPHSVKLSEVRKNSLVLQWKPPVYSGRTPVTGYFVDLKEASAKDDQWRGLNEAAIVNKYLRVQGLKEGTSYVFRVRAVNQAGVGKPSDLAGPVVAETRPGTKEVVVSVDDDGVISLNFECDQMTPKSEFVWSKDYVPTEDSPRLEVENKGDKTKMTFKDLGTDDLGTYSCDVTDTDGIASSYLIDEEEMKRLLALSQEHKFPTVPTKSELAVEILEKGQVRFWMQAEKLSSNAKVSYIFNEKEIFEGPKYKMHIDRNTGIIEMFMEKLQDEDEGTYTFQIQDGKATGHSTLVLIGDVYKKLQKEAEFQRQEWIRKQGPHFAEYLSWEVTGECNVLLKCKVANIKKETHIVWYKDEREISVDEKHDFKDGICTLLITEFSKKDAGFYEVILKDDRGKDKSRLKLVDEAFQDLMTEVCKKIALSATDLKIQSTAEGIRLYSFVCYYLDDLKVNWSHNGTGIKYTDRVKSGVTGEQIWLQINEPTPNDKGKYVMELFDGKTGHQKTVDLSGQAFDEAFAEFQRLKQAAIAEKNRARVLGGLPDVVTIQEGKALNLTCNVWGDPPPEVSWLKNEKPLTSDDHCSLKFEAGKTAFFTISGVSTADSGKYGLVVKNKYGSETSDFTVSVFIPEEELRKGAMEPPKGNQKSK

SEQ ID NO: 151 - protein, 2335 aa, Bos taurus
QPADMTSATEFENVGNQPPYSRINARWDGPDDELDNDNSSARLFERSRIKALADEREVVQKKTFTKWANSHLVHVSCRITDLYKDLRDGRMLIKLLEVLSGEMLPKPTKGKMRIHCLENVDKALQFLREQRVHLENMGSHDIVDGNHRLVLGLIWTIILRFQIQDIVVQTQEGRETRSAKDALLLWCQMKTAGYPHVNVTNFTSSWKDGLAFNALIHKHRPDLIDFDKLKDSNARHNLEHAFEVAERELGIIPLLDPEDVFTENPDEKSIITYVVAFYHYFSKMKVLAVEGKRVGKVIDHAIETEKMIEKYSGLASDLLTWIEQTITILNSRKFANSLAGVQQQLQAFSTYRTVEKPPKFQEKGNLEVLLFTIQSRMRANNQKVYTPHDGKLVSDINRAWESLEEAEYRRELALRDELIRQEKLEQLARRFDRKAAMRETWLNENQRLVAQDNFGYDLAAVEAAKKKHEAIETDTAAYEERVRALEDLAQELERENYHDQKRIMARKDNILRLWDYLQELLQARRQRLEKTLDLQKLFQDMLHSIDWMDGIKAHLLSAEFGKHLLEVEDLLQKHKLMEADIAIQGDKVKAITTATLQFTEGPGYQPCDPQVIQDRVSHLEQCFEELSNTAAGRKAQLEQSKQLCKFFWEMDEAESWIKEKEQIYSSLDYGKDLTSVLILQRKHKAFEDELRGLDAHLDQIFREAEGMVARKQFGHERIEVRIKKVSDQWNELKDLAAFCKKNLQDTENFFQFQGDADDLKAWLQDAHRLLSGEDVGHDEGATRALGKKHKDFLEELEESRGVMEHLEQQAQAFPQGFQDSPDVTNRLQALRDLYQQVVAQADMRQQRLQDALDLYTVFGETDACELWMGEKGKWLAQMEIPDTLEDLEVVQHRFDILDQEMKTLMTQIDGVNLAANSLVESNHPRSAEVKKYQDRLNTRWQDFQTMVSERREAVDSALRVHNYCVDCEETGKWIADKTKVVESTKDLGRDLAGVIAIQRKLSGLERDVAAIQARLGTLERESQQLMASHPELKEDIEQRQAYVEELWQGLMQALKSQEASLGEASQLQAFLQDLDAFQAWLSTTQKDVASKDMPESLPEAEQLLQQHAAIKDDIDRHQESYQKVRVSGEKVTHGQTDPEYLLLGQRLDGLEKGWDALSRMWESRSQALTQCLGFQEFQKDAKQAEAILSNQEYTLAHLEPPDSLEAAEAGIRKFEDFLLSMENNRDKVLSPVDSGNKLVAEGNLYSDKIKEKVQLIEDRHRKNNEKAQEASDLLKDNLELQNFLQNCQELTLWINDKLLTSQDVSYDEARNLHNKWLKHQAFVAELASHQGWLENIDAEGKQLMEEKPQFAVLVSQKLEALHQLWDELQANTQEMAQHLSAARSSDLRSQTQADLNKWIRAMEDQLQSDDLGKDLTSVNRMLAKLKRVEDQVNVRKEELQELFAQMPSLGEEAGDEALSIEKRFLDLLEPLGRRKKQLESSRAKLQISRDLEDETLWVEERLPLAQSTDYGTNLQTVQLFMKKNQTLQNEILGHTPRVEDVLHRGQQLVAAAEIDCQDVEERLGKLQGSWDTLQEAAASRLQHLREASEAQQYYLDAGEAEAWIGEQEFYVFSDENPQDEESAIVMLKRHLRQQRAVDEYGRNIKQLAGRAQGLLSAGHPEGEQIIRLQGQVDKQYAGLKDMAEERRRKLENMYHLFQLKREVDDLEQWITEKDTVASSSEMGQDFDHVTVLRDKFRDFARETGAIGQERVDNVNAIIERLIDAGHSEAATIAEWKDGLNEMWADLLELIDTRMQLLAASYDLQRYFYTSSEILGLIGEKHRELPEDVGLDASTAESFHRTHTAFERELHLLGEQVQQFQDVAARLQTAYAGEKADIIQNKEQEVSAAWQALLDACAGRRTQLVDTADKFRFFSMARDLLSWMESIVRQIETQEKPRDVSSVELLMKYHQGIQAEIETRSKNFSTCLELGESLLQRQHQASEEIREKREQVVSRREEMQEKWEARWERLRMLLEVCQFFRDASVAEAWLIAQEPYLASRDYGHTVDSVEKLIKRHEAFEKSAASWEGRFAALEKPTTLELKERQTPERTEEEPGLQEEEGETAGEAPRGPHQATTERTSPGEEERPWPQDLQPPPPPGPHEDGQEEKSSTDERPATEPLFKVLDTPLSEGDEPTTLPAQRDRGHSVQMEGFLGRKHDLEGPNKKASNRSWNNLYCVLRNSELAFYKDAKNLALGVPYHGEEPLALRHAICEIAANYKKKKHVFKLRLSNGSEWLFHGKDEEEMLSWLQGVSTAINESQSIRVKAQSLPLPPITGPEASLGKKDKEKRFSFFPKKK

SEQ ID NO: 152 - protein, 1547 aa, Bos taurus
MLSWRLHTGPEKAELQELNARLYDYVCRVRELERENLLLEEELRSRRGQEGLWAEAEARCTEEARGLRRQLDELSWATALAQGERDALRRELRELQLLGEETRAARGRLDAELDSQRRELQEELAARAALEALLGRLQAERRGLDAARERDVRELRARAAGLTLRYRGRVAGPAAPPLRLRELHEDCALLVTEAWRETVQRYEDEVRELEEALRRGRESRREAEEETRLCAQEAEALRREVLELEQLRALLEEELLRVREASELQAEERQREIAYLEDEKAALTLAMADRLRDYQDLVQVKTGLSLEVATYRALLEGESNPEILIVECIENMPQEFREKSYQYTTSVLQKENERNLFPRQKAPPASFRQSLAPRSQTPVRSDARRDVLGSGYSSFTTAWQENAYQKTASGQTNFRTFSPTPGLLRNTEAQLKTFPERPRTEGTKAPPASSAKESAAAAEPYQERRAEEAAAASEGTWSNERTVIWGKKTEAKATKEQERNRPGTIQTKREEKMFDSKEKASEERNLRWEELTKLDKEARKRESEQMREKAREKESLKEESVKGREIPIRLEASQDSTAKVAPQDLQTPLKEDAGDGTGRGVETREAGFTLGASDTTASLKGGSMTETIAENIVSSILKQFTHSPEAEASAESFPDTKVTYVDRKEVPGDRKAKTEIVVESKLTEEIDISDEAGLDYLLSKDAKEVELKGKSAERLIGDVIRLGLKGKEGRAKVVNVEIIEEPMSYVSSEKEDEFSTPFEVEEIDDVSPSSRGLVEEREEAVYGESDVTCSGDAGQEARRPQESVTHVEEVTEAGDLEGEQSYFVSTPDEHPGAPEREEGSVYGQIHIEEESTIRYSWQDEIVPGSRRRVRRDDVPGEKVVKPVDVPEVPLEGDTASAPWKEQTRSGEFHAKPIVIEKEIKIPHEFHTSIKEGSKEPRHQLVEVIEQLEENLPERMKEELSALTREGQGGPAGVSFDVKKVQSAGSGAVTLVAEVNLSQTVDADQLDLEELSKDEAGEIEKAVESVVRDSLARRRSPGPGSPEAEAGGGFRRWATQELYSSSAGEADAGLASPPGPVSATVEVTSPTGFVHAHVLEDVSQSGGRVQIASPGMWRTEQVSAEGRAAQAVEVSAEGQASWAEGSAGTSRSARLITLGARQSPVSTEVIFPGPDAACPEAGGTEEPGPAELPTEPPRFGRHSPFGSQQFYAQREVIFQAPVSGVGKAGDSSQAEESAGTQTSVKHLQLGTREGLTEQTQLTAPLSGAVELGVREASVLMEAWSGDGTSIRHVTIGPQRHQATEPIVPPPLEFSDSESSTHREGSADETLATSSYTVGRNILVTEKSTFQRAVSESPQEASAEDMSGNEVTSGVSRSFRHIQLGPAEAKTSEHIVFHGPISKTFALAGSVDSPEVSEVADSGRTLRHVALGPKETSFTFQMDVSNVEATSRWTQEARVLFPAGTEAEAPSVSEPGAWRDASSRNDLAAGVSFQGSAGDRHQAPGERGKEQAEFDKTVQLQRMVDQRSVISDEKKVALLYLDSQEEENEGHWF

SEQ ID NO: 153 - protein, 4644 aa, Bos taurus
  MOD_RES (1109)..(1109): Any amino acid
MVAGMFMPLDQLRAIYEVLFREGVMVAKKDRRPRSLHPHVPGVTNLQVMRAMASLRARGLVRETFAWRHFYWYLTNEGIAHLRQYLHLPPEIVPASLQRVRRPVAMVMPARRTPHVQAVQGPLGCPPKRGPPPTEDPAREERCVYRRKEPEEGAPEPPVVPAATPGTLARQGLEPAPPTDERDRVQKKTFTKWVNKHLIKAQRHISDLYEDLRDGHNLISLLEVLSGDSLPREKGRMRFHKLQNVQIALDYLRHRQVKLVNIRNDDIADGNPKLTLGLIWTIILHFQISDIQVSGQSEDMTAKEKLLLWSQRMVEGYQGLRCDNFTSSWRDGRLFNAIIHRHKPMLIDMNKVYRQTNLENLDQAFSVAERDLGVTRLLDPEDVDVPQPDEKSIITYVSSLYDAMPRVPDVQDGVKANELQLRWQEYRELVLLLLQWIRAHTAAFEERRFPSSFEEIEILWCQFLKFKETELPAKEADKNRSKGIYQSLEGAVQAGQLKVPPGYHPLDVEKEWGKLHVAILEREKQLRSEFERLERLQRIVSKLQMEAGLCEEQLNQADALLQSQDVRLLAAGKAPQRAGEVERDLDKADGMIRLLFNDVQALKDGRHPQGEQMYRRVYRLHERLVAIRTEYNLRLRGTPRHPELEDSTLRYLQDLLAWVEENQRRLDGAEWGVDLPSVEAQLGSHRGLHQSVEEFRAKIERARTDEGQLSPATRGAYRDCLGRLDLQYAKLLNSSKARLRSLESLHGFVAAATKELMWLSEKEEEEVGFDWSERNSNMAAKKEAYSALMRELELKEKKIKEIQSTGDRLLREDHPARPTVESFQAALQTQWSWMLQLCCCIEAHLKENTAYFQFFSDVREAEEQLRKLQETLHRKYTCDRSITVTRLEDLLQDAQDEKDQLNEYRGHLSGLAKRAKAIVQLTPRNPTQPTRGRVPLLAVCDYKQVEATVHKGDECQMLGPAQPFHWKVLSGSGSEAAVPSVCFLVPPPNQEALEAVARLEAQHQALVTLWHQLHTDMKSLLAWQSLSRDVQLIRSWSLVTFRTLKPEEQRQALRSLELHYQAFLRDSQDAGGFGPEDRLQAEREYGSCSRHYQQLLQSLEQGKCGQCGXLDKEPARECAQRIAEQQKAQAEVEGLGKGVARLSAEAEKVLALPEPSPAAPTLRSELELTLGKLEQVRSLSAIYLEKLKTISLVIRSTQGAEEALKAHEEQLKEAQAVPAALPELEATKAAMKKLRAQAEAQQPVFDALRDELRGAQEVGERLQQRHGERDVEVERWRERVTQLLERWQAVLAQTDVRQRELEQLGRQLRYYRESADPLGAWLQDARRRQEQIQAVPLADSQAVREQLRQEKALLEEIERHAEKVEECQRFAKQYINAIKDYELQLVTYKAQLEPVASPAKKPKVQSGSESVIQEYVDLRTRYSELSTLTSQYIRFISETLRRMEEEERLAEQQRAEERERLAEVEAALEKQRQLAEAHAQAKAQAEREAQELQRRMQEEVARREEVVVDAQQQKRSIQEELQQLRQSSEAEIQAKARQVEAAERSRLRIEEEIRVVRLQLETTERQRGGAEGELQALRARAEEAEAQKRQAQEEAERLRRQVQDETQRKRQAEAELGLRVKAEAEAAREKQRALQALEELRLQAEEAERRLRQAEAERARQVQVALETAQRSAQAELQSKHASFAEKTAQLERTLEEEHVTVVQLREEATRREQQQAEAERAREEAERELERWQLKANEALRLRLQAEEVAQQKSLAQAEAEKQKEAAEREARRRGKAEEQAVRQRELAEQELERQRQLAEGTAQQRLAAEQELIRLRAETEQGEQQRQLLEEELARLQSEAAAATQKRQELEAELAKVRAEMEVLLASKARAEEESRSSSEKSKQRLEAEAGRFRELAEEAARLRALAEEAKRQRQLAEEDAARQRAEAERVLSEKLAAISEATRLKTEAEIALKEKEAENERLRRLAEDEAFQRRRLEEQAAQHKADIEERLAQLRKASESELERQKGLVEDTLRQRRQVEEEILALKASFEKAAAGKAELELELGRIRGNAEDTLRSKEQAEQEAARQRQLAAEEERRRREAEERVQKSLAAEEEAARQRKAALEEVERLKAKVEEARRLRERAEQESARQLQLAQEAAQKRLQAEEKAHAFAVQQKEQELQQTLQQEQSMLERLRGEAEAARRAAEEAEEARERAEGEAAQSRQRVEEAERLKQAAEEQAQAQAQAQAAAEKLRKEAEQEAARRAQAEQAALRQKQAADAEMEKHKKFAEQTLRQKAQVEQELTALRLKLEETDHQKSILDQELQRLKAEVTEAARQRSQVEEELFSVRVQMEELGKLKARIEAENRALILRDKDNTQRLLQEEAEKMKQVAEEAARLSVAAQEAARLRQLAEEDLAQQRALAEKMLKEKMQAVQEATRLKAEAELLQQQKELAQEQARRLQEDKEQMAQQLAQETQGFQRTLETERQRQLEMSAEAERLRLRVAEMSRAQARAEEDAQRFRKQAEEISAKLHRTELATQEKVTLVQTLETQRQQSDRDADRLREAIAELEREKDKLKKEAELLQLKSEEMQTVQQEQLLQETQALQQSFLSEKDSLLQRERFIEEEKAKLERLFQDEVAKAQKLREEQQRQQQQMQQEKQQLLASMEEARRRQREAEEGVRRKQEELQLLEQQRQQQEQLLAEENRRLRERLEHLEEEHRAALAHSEEITAAQAAATRALPNGQDATDGPAAEPEHAFEGLRQKVPAQQLQEAGILSTEEVQRLVQGHTTVAELTQREDVRRYLQGHSSIAGLLLKPANEKLTIYAALRRQLLSPGTAVILLEAQAASGFLLDPVRNRRLTVNEAVKEGVVGPELHHKLLSAERAVTGYKDPYTGEQISLFQAMKKDLIVREHGIRLLEAQIATGGVIDPVHSHRVPVDVAYQRGYFDEEMNRVLQDPSDDTKGFFDPNTHENLTYLQLLERCVEDPETGLRLLPLTDQAAKGGELVYTDSEARDVFEKATVSAPFGKFQGKTVTIWELINSEYFTAEQRRDLLRQFRTGKVTVEKIIKIVITVIEEHEQKGQLCFQGLRALVPAAELLESGVIDWDLFRQLQLGERSVQEVAEVEAVRRALRGSGVIAGVWLEEARQKLSIYEALKKELLQPEAAVALLEAQAGTGHVIDPATSARLTVDEAVRAGLVGPELHEKLLSAEKAVTGYKDPYSGQSVSLFQALKKGLIPREQGLRLLDAQLSTGGIVDPSKSHRLPLDVACARGYLDKETSTALTAPRDDAKTYYNPRTWEPATYSQLQQQCRPDPLTGLSLLPLSEEAARARQQELYSEVQAREAFQKATVEVPVGSFQGRAVTIWELINSEYFTAEQRQELLRQFRTGKVTVEKIIKIIITIVEEVETTRRERLSFSGLRAPVPASELLASGILSSSQFEQLKDGKTSVKDLSELDSVRTLLQGSGCLAGIYLEESKEKVTIYEAMRRGLLRPSTAILLLEAQAATGFLVDPVRNQRLYVHEAVKAGVVGPELHEKLLSAEKAVTGYKDPYSGSTISLFQAMKKGLVVREHGIRLLEAQIATGGIIDPVHSHRVPVDVAYQRGYFDKEMNRVLEDPSDDTKGFFDPNTRENLTYRQLLERCVEDPETGLRLLPLKGPEKAEVVETTRVYTEEETRRAFEETQIDIPGGGSHGGSTMSLWEVMQSDLIPEEQRAQLMADFQAGRVTKERMIIIIIEIIEKTEIVRQQNLASYDYVRRRLTAEDLHEARVISRESYSLLREGTRSLREVLEAESAWRYLYGTGCVAGVYLPGSRQTLTIYQALKKGLLSAEVARLLLEAQAATGFLLDPVKGDRLTVDEAVRKGLVGPELHDRLLSAERAVTGYRDPYTEQTISLFQAMKKDLIPAEEALRLLDAQLATGGIVDPRLGFHLPLEVAYQRGYLNKDTHDQLSEPSEVRSYIDPSTDERLSYTQLLRRCRRDEASGLFLLPLSDARKLTFRGLRKQITVEELVRSHVMDEATAQRLQEGLTSIEEVSKNLQKFLEGTSSIAGVLVDATKERLSVYQAMKKGIIRPGTAFELLEAQAATGYVIDPIKGLKLTVEEAVRMGIVGPEFKDKLLSAERAVTGYKDPYSGKLISLFQAMKKGLILKDHGIRLLEAQIATGGIIDPEESHRLPVDVAYQRGLFDEEMNEILTDPSDDTKGFFDPNTEENLTYLQLMERCVTDPQTGLRLLPLKEKKRERKTSSKSSVRKRRVVIVDPETGKEMSVYEAYRKGLIDHQTYLELSEQECEWEEITISSSDGVVKSMIIDRRSGRQYDIDEAIAKSLIDRSALDQYRAGTLSITEFADMLSGNAGGFRSRSSSVGSSSSYPISPAVSRTQLASWSDPTEETGPVAGILDTETLEKVSITEAMHRNLVDNITGQRLLEAQACTGGIIDPNTGERFPVTEAVNKGLVDKIMVDRINLAQKAFCGFEDPRTKTKMSAAQALKKGWLYYEAGQRFLEVQYLTGGLIEPDTPGRVPLDEALQRGTVDARTAQKLRDVSAYSKYLTCPKTKLKISYKDALDRSMVEEGTGLRLLEAATQSSKGYYSPYSVSGSGSTTGSRSGSRTGSRAGSRRGSFDATGSGFSMTFSSSSYSSSGYGRRYASGPTSSLGGPESTAA

SEQ ID NO: 154 - protein, 1116 aa, Rattus norvegicus
MARIPRCDFLGLPGICYLLSFLLAGLLLPRASAFNLDVMGAIRKEGEPGSLFGFSVALHRQLQPRPQSWLLVGAPQALALPGQQANRTGGLFACPLSLEETDCYRVDIDRGANVQKESKENQWLGVSVRSQGAGGKVVTCAHRYESRQRVDQVLETRDVIGRCFVLSQDLAIRDELDGGEWKFCEGRPQGHEQFGFCQQGTAATFSPDSHYLIFGAPGTYNWKGLLFVTNIDSSDPDQLVYKTLDPADRLTGPAGDLTLNSYLGFSIDSGKGLMRSEELSFVAGAPRANHKGAVVILRKDSASRLIPEVVLSGERLTSGFGYSLAVTDLNSDGWADLIVGAPYFFERQEELGGAVYVYMNQGGHWADISPLRLCGSPDSMFGISLAVLGDLNQDGFPDIAVGAPFDGDGKVFIYHGSSLGVVTKPSQVLEGEAVGIKSFGYSLSGGLDVDGNHYPDLLVGSLADTAALFRARPVLHVSQEIFIDPRAIDLEQPNCADGRLVCVHVKVCFSYVAVPSSYSPIVVLDYVLDGDTDRRLRGQAPRVTFPGRGPDDLKHQSSGTVSLKHQHDRVCGDTVFQLQENVKDKLRAIVVTLSYGLQTPRLRRQAPDQGLPLVAPILNAHQPSTQRTEIHFLKQGCGDDKICQSNLQLAQAQFCSRISDTEFQALPMDLDGTALFALSGQPFIGLELTVTNLPSDPARPQADGDDAHEAQLLATLPASLRYSGVRTLDSVEKPLCLSNENASHVECELGNPMKRGTQVTFYLILSTSGITIETTELKVELLLATISEQDLHPVSVRAHVFIELPLSISGVATPQQLFFSGKVKGESAMRSERDVGSKVKYEVTVSNQGQSLNTLGSAFLNIMWPHEIANGKWLLYPMRVELEGGQGPEKKGICSPRPNILHLDVDSRDRRRRELGQPEPQEPPEKVEPSTSWWPVSSAEKRNVTLDCAQGTAKCVVFSCPLYSFDRAAVLHVWGRLWNSTFLEEYMSVKSLEVIVRANITVKSSIKNLLLRDASTVIPVMVYLDPVAVVAEGVPWWVILLAVLAGLLVLALLVLLLWKCGFFRRNSPSSSFPANYHRAHLAVQPSAMEAGGPGTVGWDSSSGRSTLRPLYPSTTQ

SEQ ID NO: 155 - protein, 801 aa, Bos taurus
MNLQLIFWIGLISSVCCVFGQADENRCLKANAKSCGECIQAGPNCGWCTNSTFLQEGMPTSARCDDLEALKKKGCHPNDIENPRGSKDIKKNKNVTNRSKGTAEKLQPEDITQIQPQQLVLQLRSGEPQTFTLKFKRAEDYPIDLYYLMDLSYSMKDDLENVKSLGTDLMNEMRRITSDFRIGFGSFVEKTVMPYISTTPAKLRNPCTNEQNCTSPFSYKNVLSLTDKGEVFNELVGKQRISGNLDSPEGGFDAIMQVAVCGSLIGWRNVTRLLVFSTDAGFHFAGDGKLGGIVLPNDGQCHLENDVYTMSHYYDYPSIAHLVQKLSENNIQTIFAVTEEFQPVYKELKNLIPKSAVGTLSANSSNVIQLIIDAYNSLSSEVILENSKLPEGVTINYKSYCKNGVNGTGENGRKCSNISIGDEVQFEISITANKCPNKNSETIKIKPLGFTEEVEIILQFICECECQGEGIPGSPKCHDGNGTFECGACRCNEGRVGRHCECSTDEVNSEDMDAYCRKENSSEICSNNGECVCGQCVCRKRDNTNEIYSGKFCECDNFNCDRSNGLICGGNGVCKCRVCECNPNYTGSACDCSLDTTSCMAVNGQICNGRGVCECGACKCTDPKFQGPTCEMCQTCLGVCAEHKECVQCRAFNKGEKKDTCAQECSHFNITKVENRDKLPQPGQVDPLSHCKEKDVDDCWFYFTYSVNGNNEATVHVVETPECPTGPDIIPIVAGVVAGIVLIGLALLLIWKLLMIIHDRREFAKFEKEKMNAKWDTQENPIYKSPINNFKNPNYGRKAGL

SEQ ID NO: 156 - protein, 803 aa, Gallus gallus
MAETNLTLLTWAGILCCLIWSGSAQQGGSDCIKANAKSCGECIQAGPNCGWCKKTDFLQEGEPTSARCDDLAALKSKGCPEQDIENPRGSKRVLEDREVTNRKIGAAEKLKPEAITQIQPQKLVLQLRVGEPQTFSLKFKRAEDYPIDLYYLMDLSYSMKDDLENVKSLGTALMREMEKITSDFRIGFGSFVEKTVMPYISTTPAKLRNPCTGDQNCTSPFSYKNVLSLTSEGNKFNELVGKQHISGNLDSPEGGFDAIMQVAVCGDQIGWRNVTRLLVFSTDAGFHFAGDGKLGGIVLPNDGKCHLENNMYTMSHYYDYPSIAHLVQKLSENNIQTIFAVTEEFQAVYKELKNLIPKSAVGTLSSNSSNVIQLIIDAYNSLSSEVILENSKLPKEVTISYKSYCKNGVNDTQEDGRKCSNISIGDEVRFEINVTANECPKKGQNETIKIKPLGFTEEVEIHLQFICDCLCQSEGEPNSPACHDGNGTFECGACRCNEGRIGRLCECSTDEVNSEDMDAYCRRENSTEICSNNGECICGQCVCKKRENTNEVYSGKYCECDNFNCDRSNGLICGGNGICKCRVCECFPNFTGSACDCSLDTTPCMAGNGQICNGRGTCECGTCNCTDPKFQGPTCEMCQTCLGVCAEHKDCVQCRAFEKGEKKETCSQECMHFNMTRVESRGKLPQPVHPDPLSHCKEKDVGDCWFYFTYSVNSNGEASVHVVETPECPSGPDIIPIVAGVVAGIVLIGLALLLIWKLLMIIHDRREFAKFEKEKMNAKWDTGENPIYKSAVTTVVNPKYEGK

SEQ ID NO: 157 - protein, 798 aa, Sus scrofa
MNLQLIFWIGLISSVCYVFGQADENRCLKANAKSCGECIQAGPNCGWCTNSTFLQEGMPTSARCDDLEALRKKGCHPDDIENPRGSKNIKKNKNVTNRSKGTAEKLQPEDITQIQPQQLVLQLRSGEPQTFTLKFKRAEDYPIDLYYLMDLSYSMKDDLENVKSLGTDLMNEMRRITSDFRIGFGSFVEKTVMPYISTTPAKLRNPCTSEQNCTSPFSYKNVLSLTDKGEVFNELVGKQRISGNLDSPEGGFDAIMQVAVCGSLIGWRNVTRLLVFSTDAGFHFAGDGKLGGIVLPNDGHCHLENDVYTMSHYYDYPSIAHLVQKLSENNIQTIFAVTEEFQPVYKELKNLIPKSAVGTLSANSSNVIQLIIDAYNSLSSEVILENSKLPEGVTINYKSYCKNGVNGTGENGRKCSNISIGDEVQFEISITANKCPNKNSETIKIKPLGFTEEVEIILQFICECECQSEGIPSSPKCHDGNGTFECGACRCNEGRVGRHCECSTDEVNSEDMDAYCRKENSSEICTNNGECVCGQCVCRKRDNTNEIYSGKFCECDNFNCDRSNGLICGGNGVCKCRVCECNPNYTGSACDCSLDTTSCMAVNGQICNGRGVCECGVCKCTDPKFQGPTCEMCQTCLGVCAEHKECVQCRAFNKGEKKDTCAQECSHFNITKVENRDKLPQPGQVDPLSHCKEKDVDDCWFYFTYSVNGNNEATVHVVETPECPTGPDIIPIVAGVVAGIVLIGLALLLIWKLLMIIHDRREFAKFEKEKMNAKWDTGENPIYKSAVTTVVNPKYEGK

SEQ ID NO: 158 - protein, 357 aa, Bos taurus
WQKHLAGRGWGPWHIKPPGPAEAGCDGTMADSEEVQRATALIEERLAQEEENEKLRGTTHQKLPMEMLVLEDEKHHRPESPSLQKVKGQERVRKTSLDLRREIIDVGGIQNLIQLRKKRKQKKREALAASQEPPPEPEEITGPVDEETFLKAAVEGKMKVIEKFLADGGSPDTCDQFRRTALHRASLEGHMEILEKLLESGATVDFQDRLDCTAMHWACRGGHLEVVRLLQSRGADTNVRDKLLSTPLHVAVRTGQVEIVEHFLSLGLDINAKDREGDSALHDAVRLNRYKIIKLLLLHGADMMSKNLAGKTPTDLVQLWQADTRHALENPEPGSEQNGLEGSTESGRETPQPVAAE

SEQ ID NO: 159 - protein, 2043 aa, Gallus gallus
MAAPAPPAPGGGTSPPAGPPRLRQSDSNASFLRAARAGNLDKVVEYLKSGIDINTCNQNGLNALHLAAKEGHVGLVQELLERGSAVDSATKKGNTALHIASLAGQAEVVKVLVKEGANINAQSQNGFTPLYMAAQENHIEVVKYLLENGANQSTATEDGFTPLAVALQQGHNQAVAILLENDTKGKVRLPALHIAARKDDTKSAALLLQNDHNADVQSKMMVNRTTESGFTPLHIAAHYGNVNVATLLLNRGAAVDFTARNGITPLHVASKRGNTNMVKLLLDRGGQIDAKTRDGLTPLHCAARSGHDQVVELLLERGAPLLARTKNGLSPLHMAAQGDHVECVKHLLQHKAPVDDVTLDYLTALHVAAHCGHYRVTKLLLDKRANPNARALNGFTPLHIACKKNRIKVMELLVKYGASIQAITESGLTPIHVAAFMGHLNIVLLLLQNGASPDVTNIRGETALHMAARAGQVEVVRCLLRNGALVDARAREEQTPLHIASRLGKTEIVQLLLQHMAHPDAATTNGYTPLHISAREGQVDVASVLLEAGASHSMSTKKGFTPLHVAAKYGSLEVAKLLLQRRASPDSAGKNGLTPLHVAAHYDNQKVALLLLEKGASPHATAKNGYTPLHIAAKKNQMQIATTLLNYGAETNILTKQGVTPLHLASQGGHTDMVTLLLEKGSNIHVATKTGLTSLHLAAQEDKVNVAEILTKHGANQDAQTKLGYTPLIVACHYGNIKMVNFLLKQGANVNAKTKNGYTPLHQAAQQGHTHIINVLLQHGAKPNAITTNGNTALAIARRLGYISVVDTLKVVTEEITTTTTTVTEKHKLNVPETMTEVLDVSDEEAFKHSDDERFSDGEVYNGTGVISRNSWSDDTMTGDGGEYLRPEDLKELGDDSLPSSQFLDGMNYLRYSLEGGRSDSLRSFSSDRSHTLSHASYLRDSAMIDDTVVIPSQQVTTLAKEAERNSYRLSWGPENLDNVALSSSPIHSGCSSPCLDHDNSSFLVSFMVDARGGAMRGCRHNGLRIIIPPRKCTAPTRVTCRLVKRHRLATMPPMVEGEGLASRLIEVGPSGAQFLGPVIVEIPHFAALRGKERELVILRSENGDSWKEHFCEYTEDELNEILNGMDEVLDTPEELEKKRICRIITRDFPQYFAVVSRIKQDSNLIGPEGGVLSSTVVPQVQAVFPEGALTKRIRVGLQAQPMHTELIKKILGNKATFSPIVTLEPRRRKFHKPITMTIPVPKASSDGIMNGYGGDTPTLRLLCSITGGTTPAQWEDITGTTPLTFVNECVSFTTNVSARFWLIDCRQTQESVTFASQVYREIICVPYMAKFVVFAKSHDPIEARLRCFCMTDDKVDKTLEQQENFAEVARSRDVEVLEGKPIYVDCFGNLVPLTKSGQHHIFSFFAFKENRLPLFVKVRDTTQEPCGRLSFMKEPKSTRGLVHQAICNLNITLPVYTKESESDQEQEEEVDMTSEKNQQDDRERTEERLAHIADHLGFSWTELARELDFTEEQIHQIRIENPNSLQDQSHALLKYWLERDGKHATDTSLTQCLTKINRMDIVHLMETSGIDSMQVHGTRTYTEIEQTIGLDHSEGFSVLQEELYSSRHKPDERHRISKDGDPTEHPPIVSEEDVSVSYSPFQDSTPRSEAELSMAELLRQTHKEQVEAEFSGKPQDVIETTSSQHEYFVTTPGTEQRAASDTSARFSATKEEREKTSPQSPSSAQRGGSPIIQEPEELHLHQDDPSPRRTSLVIVESIDEQPEKLGSGYEEESLEKELAEELGELENSSDEDEMVTTRVVRRRVIIQADSMPEMPPETVTEEQYTDEHGHTVVKKVTRKIIRRYVSPDGTEKEDIIMQGTPQKPVTVEEGDGYSKVVKRVVLKSDSEQSEVTLSEPGVLPSASNFQSEPVEGRKVSKVIKTTVVQGERMEKHLGDASLATDLPSAKEDFEEALSYTGNQIKIQLPALVEKEIMKEDGSIIKRTTLSKASTQKRTVMKDRYGKHVHIEELDDTPEALPQDDLQHDLQQLLRHFCKEDWKQEAK

SEQ ID NO: 160 - protein, 3905 aa, Sus scrofa
EGQSQDKGSKSGSSIQSLFFFSQSDSNASFLRAARAGNLDKVVEYLKGGIDINTCNQNGLNALHLAAKEGHVGLVQELLGRGSSVDSATKKGNTALHIASLAGQAEVVKVLVKEGANINAQSQNGFTPLYMAAQENHIDVVKYLLENGANQSTATEDGFTPLAVALQQGHNQAVAILLENDTKGKVRLPALHIAARKDDTKSAALLLQNDHNADVQSKMMVNRTTESGFTPLHIAAHYGNVNVATLLLNRGAAVDFTARNGITPLHVASKRGNTNMVKLLLDRGGQIDAKTRDGLTPLHCAARSGHDQVVELLLERGAPLLARTKNGLSPLHMAAQGDHVECVKHLLQHKAPVDDVTLDYLTALHVAAHCGHYRVTKLLLDKRANPNARALNGFTPLHIACKKNRIKVMELLVKYGASIQAITESGLTPIHVAAFMGHLNIVLLLLQNGASPDVTNIRGETALHMAARAGQVEVVRCLLRNGALVDARAREEQTPLHIASRLGKTEIVQLLLQHMAHPDAATTNGYTPLHISAREGQVDVASVLLEAGAAHSLATKKGFTPLHVAAKYGSLDVAKLLLQRRAAADSAGKNGLTPLHVAAHYDNQKVALLLLEKGASPHATAKNGYTPLHIAAKKNQMQIASTLLNYGAETNIVTKQGVTPLHLASQEGHTDMVTLLLDKGANIHMSTKSGLTSLHLAAQEDKVNVADILTKHGADQDAHTKLGYTPLIVACHYGNVKMVNFLLKQGANVNAKTKNGYTPLHQAAQQGHTHIINVLLQHGAKPNATTANGNTALAIAKRLGYISVVDTLKVVTEEVTTTTTTITEKHKLNVPETMTEVLDVSDEEGDDTMTGDGGEYLRPEDLKELGDDSLPSSQFLDGMNYLRYSLEGGRSDSLRSFSSDRSHTLSHASYLRDSAMIDDTVVIPSHQVSALAKEAERNSYRLSWGTENLDNVALSSSPIHSGFLVSFMVDARGGAMRGCRHNGLRIIIPPRKCTAPTRVTCRLVKRHRLATMPPMVEGEGLASRLIEVGPSGAQFLGKLHLPTAPPPLNEGESLVSRILQLGPPGTKFLGPVIVEIPHFAALRGKERELVVLRSENGDSWKEHYCEYTEDELNEILNGMDEVLDSPEDLEKKRICRIITRDFPQYFAVVSRIKQDSNLIGPEGGVQAVFPEGALTKRIRVGLQAQPMHSELVKKILGNKATFSPIVTLEPRRRKFHKPITMTIPVPKASSDVMLNGFGGDAPTLRLLCSITGGTTPAQWEDITGTTPLTFVNECVSFTTNVSARFWLIDCRQIQESVTFASQVYREIICVPYMAKFVVFAKSHDPIEARLRCFCMTDDKVDKTLEQQENFAEVARSRDVEVLEGKPIYVDCFGNLVPLTKSGQHHIFSFFAFKENRLPLFVKVRDSTQEPCGRLSFMKEPKSTRGLVHQAICNLNITLPIYTKESESDQEQEEEVIVRHYDETESTETSVLKSHLVNEVPVLASPDLLSEVSEMKQDLIKMTAILTTDVSDRAGSLKVKELVKAAEEEPGEPFEIVERVKEDLEKVNEILRSGTCAGDEGSEPRSQPEREVVEEEWVIVSDEEIEEAKRKAPLEITEYPCVEVRLDKDTKVKVEKDSLGLVNYLTEDLNSYVPPHGEPLQMEREKQEALGPGRSSESEGKDAPSEETQSTQKQPKPSLGIKKPVRRKLKDKQKQKEDSSQASADKSELKKGSSEESLDEDTGLAPEPLPAVKATSPLIEETPIGSIKDKVKALQKRVEDEQKGRSKLPVRVKGKEDVPKKITHRTQLAASPSLKSERHALASKPERHSSLSSPAKTERHPPVSPSSKTEKHSPVSPSAKTERHSPVSSSSKTEKHSPVSPSTKPDRHSPVSSATKTERHPPVSPSGKTDKRPPVSPSGRTEKHPPVSPGRTEKRLPVSPAGRMERHSPMSTSGKTEKHLPVSPSGKTDKQPPVSPTSKTERIEETMSVRELMKAFQSGQDPSKHKTGLFEHKSAKQKQPQEKGKVRGEKEKGLTVTQKETQKTETQTIKRSQRFLVTGPQNPEEQPVVKREEGAGERGKALNHKTPEPVQSAPEEESHKVESPKEKLADEQGDMDLQISPDRKTSTDFSDVIKQELEDNDKYQEFCHNQVLTSPFNTTFPLDYMKEEFLPALSLQSGALDGSSESLKHEGAAGSPCGSLMEGTPQISSEESYKHEGLAETPETSPESLSFSPKKTEEQTEETKETTKVESPPEIHSEKEDPSTKDVTDSSAGQGAVVTGGTEPSAECLLKEATLEPSKDTCPQPEDEGLDSQGESLAKETPKGLTEGVPHGEDPLTHVSSAHEKQTDTEAQKSTASKPSDETAASPLPDAVVKTSPGTESKPQGVIRSPQGLELALPSRDSEVFSPGADESFAVSHKDSLEASPVLEDNSSHKTPDSLEPSPLKESPCRDSLESSPVEPKMKAGILPSQFPLPSAVAKTELITEVASMRSRLLRDPDGSAEDDSLEQTSLMESSGKSPLSPDTPSSEEISYEVTPKTTDAGTPKPAVIPECAEEDDLENGEKKRFTPEEEMFKMVTKIKISKQKRDYKKEPKQEDSSSSSDADVECSADLDEPKCMESVEDKSNAPVVVTAESRKASSSSESEPELTQLKKGADSGLLPEPVIRVQPPSPLPSSIDSNSSPEEVQFQPIVSKQYTFKMNEDTQEDSGKSEEEEGCESHLPEDSHTVSTSGPEMSYDDVNRDADQPKICGSYGCEAESPSSSAIPVTLGLHSSTGEDVHEQLVIHKEPLALQDTGEKDTEGEELDVSRVEAPQVGYPTESSSSSSSLPHCPASEGKELDEDVVSTSSATKMEVTKADQAFESLPDDYSTQDLPNTTQTDSSSLDVPVSDPTETDDISDPQVTSPYENVPSQSFFSSEESKTQTDTRHTSFHSSEVCSVTTTSSVEEVVVTSSSGRTVSSQESNLEDQNLECKQESPLCEVQPDGAPSSLEPAAPTTSTVVGEQISKVIITKTDVDSDSWSEIREDDEAFEARVKEEEQKIFGLMVDRQSQGTTPDTTPARTPTEEGTPTSEQNPFLFQEGKLFEMTRSGAIDMTKRSYGDESFHFFQIGQESREETLTEDMKEGGTGTELPQLETSAESLAPLESKETVNDEADLVPDDLSEEVEEVPTSDGQLNSQMGISASTETSMKEAASAGAEDLPCIQMSDTPSLSLVKQAALQLDFSTVTRSVYSDRDDESPDSSPEEQKSVIEIPTAPMENVPSTESRSKIPVRTMPTSTPAFPSMECESAPSEGFLPSLDEESQEDETKPKSKIPVKAPVPRVEQQLLHLDSSLQETVAPQGQDVTSRAPDSRSKSESDASPLDAKITCPEKTGSYTETDLESSEGTEELELESEDETTRPKIFASRLPVKSKSTTSSCRGATSPTKESKEHFFDLYRNSIEFFEEISDEASKLVDRLTQSEREQELVSDDESSSALEVSVIENLPPVETEQSIPEDIFDTRPIWDESIETLIERIPDENGHDHAEDQQDEQERIEERLAYIADHLGFSWTELARELDFTEEQIHQIRIENPNSLQDQSHALLKYWLERDGKHATDTNLIECLTKINRMDIVHLMETITEPLQERISHSYAEIEQTITLDHSEGFSVLQEELCTAQNKQKEEQAASKEGESYDHPPIVSEEDISVGYSTFQDSIPKTEGDGSVTELLPKTHEEQVQQDFSGKMQDLPEESSLEQQEYFVTTPGTEASETPKATAAPGSPSKTPEEIITPPEEERPYLQTPTASEQGDSPIVQEPEEPPEHREASLPQKTSLVIVESADDQPQTFERLDEDAAFQKGDDMPDIPPETVTEEEYVDEHGHTVVKKVTRKIIRRYVSSDGTEKEEMTMQGAPQDPISIEEGDGYSKVIKRVVLKSDTERSEVRADFVERCK

SEQ ID NO: 161 - protein, 559 aa, Gallus gallus
MDDLDALLADLESTTSHISKRPVFLTEETPYSYPTGNHTYQEIAVPPPVPPPPSSEALNGTVIDPLDQWQPSVSRYGHQQPQSQSPIYSSSAKSSSASVPRDGLSSPSPRASEEEHVYSFPNKQKSAEPSPTMTSTSLGSNLSELDRLLLELNAVQHNPPSGFSADEVSRSPSLPNVTGPHYVIPESSSSAGGKAAPPTKEKPKRNGGRGIEDVRPSVESLLDELESSVPSPVPAITVSQGEVSSPQRVNASQQQTRISASSATRELDELMASLSDFKFMAQGKAGGSSSPPSTTPKPGSQLDTMLGSLQSDLNKLGVATVAKGVCGACKKPIAGQVVTAMGKTWHPEHFVCTHCQEEIGSRNFFERDGQPYCEKDYHNLFSPRCYYCNGPILDKVVTALDRTWHPEHFFCAQCGVFFGPEGFHEKDGKAYCRKDYFDMFAPKCGGCARAILENYISALNTLWHPECFVCRECFTPFINGSFFEHDGQPYCEVHYHERRGSLCSGCQKPITGRCITAMGKKFHPEHFVCAFCLKQLNKGTFKEQNDKPYCQNCFLKLFC

SEQ ID NO: 162 - protein, 586 aa, Bos taurus
ALLADLESTTSHISKRPVFLSEETPYSYPTGNHTYQEIAVPPVPPPPSSEALNGSVLDPLDPWPPSTSRFTHQQPQSSSPVYGSSAKTSSASNPQDGGGPPCPRAGEEDHVYSFPNKQKSAEPSPTVMSSSLGSNLSELDRLLLELNAVQHNPPGFPADEANSSPPLPGPLSTHYGVPENNSLLGGKAGALTKEKPKRNGGRGLEDLRPSVENLLDELESSVPSPVPTITVNQGEMSSPQRVTSSQQQTRISASSATRELDELMASLSDLSKIQDLEQRADGELCWAAGWPLNGRQSGPEGQDMGGFMAQGKTGSSSPPGGPPKPGSQLDSMLGSLQSDLNKLGVATVAKGVCGACKKPIAGQVVTAMGKTWHPEHFVCTHCQEEIGSRNFFERDGQPYCEKDYHNLFSPRCYYCNGPILDKVVTALDRTWHPEHFFCAQCGAFFGPEGFHEKDGKAYCRKDYFDMFAPKCGGCARAILENYISALNTLWHPECFVCRECFTPFVHGSFFEHEGQPYCEAHYHERRGSLCSGCQKPITGRCITAMAKKFHPEHFVCAFCLKQLNKGTFKEQNDKPYCQNCFLKLFC

SEQ ID NO: 163 - protein, 553 aa, Sus scrofa
DALLADLESTTSHISKRPVFLSEETPYSYPTGNHTYQEIAVPPPVPPPPSSEALNGSVLDPIDQWQPSTSRFIHQQPQAPSPVYGSSAKTSSSSNPQDGIGLPCPRASEEEHVYSFPNKQKSAEPSPTVMSSSLGSNLSELDRLLLELNAVQHNAPGFPTDEANSSPPLPGALSPHYGVLEHNSSLGGKAGPVTKEKPKRNGGRGLEDVRPSVESLLDELESSVPSPVPAITLNQGEMNSPQRVTSSQQQTRISASSATRELDELMASLSDFKFMAQGKTGSSSPPGGPPKPGSQLDSMLGSLQSDLNKLGVATVAKGVCGACKKPIAGQVVTAMGKTWHPEHFVCTHCQEEIGSRNFFERDGQPYCEKDYHNLFSPRCYYCNGPILDKVVTALDRTWHPEHFFCAQCGAFFGPEGFHEKDGKAYCRKDYFDMFAPKCGGCARAILENYISALNTLWHPECFVCRECFTPFVNGSFFEHDGQPYCEVHYHERRGSLCSGCQKPITGRCITAMAKKFHPEHFVCAFCLKQLNKGTFKEQNDKPYCQNCFLKLFC

SEQ ID NO: 164 - protein, 1748 aa, Gallus gallus
MLSMEGFVGARALGEESLQMWDLNKRLEAYLARVKFLEEENEGLRAEIQSTKENPAGDPRRARYEEELRSLRDALHRAFTEKCAAELARDNLYEEVQHVRSRCQKEQAAREEAKRQLSSSKKELEEERRAQIWLKERAVQLEKEVEALLEVHEEEKAGLDQELASFSQSLEGFRCAPVAFQPVEVEDYSKRLSEIWRGAVETYKAEVSQLERALGQAKENLWQVAEDNQQSQLQLRHLEKELVGLKVRKEMLEESLGQQWQEQHGEAEKFQLAIEALEQEKQSLQVQIAQVLEDRQQLMHLKMSLSLEVATYRTLLEAESTRLQMPPGEFKLANSLRDVKLEASSSKHRASLAAFPRPEGVAQLCRTPGDALKVLTPKSKSSSALEFQKISSVLQAPRSWEPAAPSPTVPVVSPEPGSGGAESPVHECGAGKESPMLSPLSPEQLVNHALQDALKEMQDDAEAKEVPTLSATQSTRDGDLEATMEEEEAAGTQGVGAEGETVSPPGLCFCSNEPTLLSATQSDVESQEEMWEEERSKEEMLNPLSSMESQEPGGEPWGGVTRRSRLQVGKEDMEATSTEALHISEKKEQREIWSPSREDEECEFPDEEREMQEEGSLQMEIEAACAVPVGSHPVLPTGIHLQEDFLEREQESEHQETSLGELGAAAGEEREQEVCQELKASSIEEAMPAAEGSSGSGEGTTGRESTGRARDDEGEEEDKGREALGEDDLQAGEALGAKELGKESMGLEEAEGMWEESVDLQEEHRDLQEGHGDLQVEHEDLWEEHGHIQEEHGDTQEEYGDTQEEHGDLQVEGGDLQEEHGDTQEEHGDLQEEHGDTQEEHGDLQVEHEDLQVEHGDLWEEHRDVQEEHGDTQEEYGDTQEEHGDLQVEGGDLQEEHGDTQEEHEDLQEEHGDTQEEHGDLQVEHGDLQEEHRDLQEGHGDLKEEHGDLQVEHEDLQVEHGDLQEEHGDTQEEHGDLQEEHGDLQVEHEDLQVEHGDLQVEHGDLQEEHGDTQEEHRDLQEVHGDQQEEHRDLQEGHGDLQEEHGDLQVEHGDLQEEYGDTQEEHRDLQEVHGDQQEEHRNLQEGHGDLQEGHGDLQEEHGDLWKEHGVLKEEHGDLQEGHGDLQEESGDPQEEPGEPWVQHGEQGSAGDGLEQDMVLQPGEGAWGREDNDISQKQQAQDWEGTAEDEEETGVNTITSQEPTQVDDNPHAEAAENEERDVTSPTAMEETQEGEDEGDAGSEVQSQQQPQDTPGQEAEPAPGQKEVRYGDTGEAPGDPQEPAEALEVEDEELSSEPIELERGSPDTAVMQQDLGNGAESDEPMEEDFQSEDAQLEEPKACRMELEDTLLNSTPLCAYSGEMLESDPNPPSSGGDGEAAPEMAQEEEGDLRGSDEAAVHAEPESCEELSPAPECTEEEEGYFIVSAPSQEGSSMEEAENSEEFEEIKVEAAEDRKDELTAPGVASLVPEDEGHSEPFVGEAEDVKMPLGEFEMPKEEDEEDAGGFAAELEEGLTVPVAEGLSEGHTDKTTLGDEGLGEEDVQDGDNPPATETSDTDPSNTDPPPGTMLEHGAGMEAAEYLPDVPTQLPVDIMKDSDILEIVEQALEFNQELVLGAKLAKDGQEEDGDAQPPQEEEGGSSPTSSCDEQPTVQEAVAEPERTKNGEQNGLHRQASLEDLAEFTEEGLNGITHPGEAPAAHTLPLPSKHSGAEPVPELSPLQTTSCARSRSPGPLGRSDAVGPHSPATIGRLP

SEQ ID NO: 165 - protein, 1483 aa, Danio rerio
MSESLKLQKEQEERDLETRYESSYHQSSLSSVSRQSYTAYVSSHGHKISGKKKEKKLTPLSKKEKRSYLAVDKEDEVIGYVVPVFRSSHLATQDLMETQEEVKEEGVGYVVMRNLFARESGFKMRTVKKTRETSMRESAERMALSQKLHEKEQFQKKMNPDSLTHPPEFIVKPRGQTVWEGKSVTLHCTVAGWPKPRVAWYKNNVLIDAKARPEKYFTESQYNMHSLEIKNCTFSDTAEYRISALNVKGESSAFAPVIIKRFKEEEELVERPHGYSPEYGVTFNTTIIDKFDVSFGREGETMSLGCTVIVYPTVKRYQPEIVWYRNGVALSSSKWVHMHWSGEKATLTLVHLNKEDEGLYTLRVNTKSGFDTHSAYVFVRDADVEEEGVPVAPLDVRCHDANKDYVVVTWKQPAVEGSSAITGYFIDRLEVGNHHWTQCNDTPVKYARFPVTGLIEGRSYMFRVRALNNAGVSRPSRVSDPVVAMDPSDRARLRAGPSAPWTGVIKFTEEDPTVGVIPGPPTDLAVTEATKSYVVLSWKPPVQRGHEGVMYYVEKCLVGTDAWQRVNTGIPVKSPRFALFDLAEDKSYTFRVRSCNSAGVGEPSEETGATTVGDRLDLPSAPGPVIPIRNTDSSVVVCWGASKEVKDLVGYYIEVTVDGSGVWAPCNNKPVKGTRFVCHGLNATDKCTFRVKAVNAAGYSGSSAESEACLVKASIAVPSPPTGVTTLERLRDYMVIGWQAPAKTGGADIRGYYLDYRTVKDGVTSKWHELNLKAVTSSPYKVTDLKENEFYQFQVRAFNQAGISEASIPTAPLECKEWTVAVPGPPHGLRVQEVRKDSMVVLWEPPTFNGRSPVTGYYVDFKEENGRWRCVQERSTKHTYMKVSGLQEGISYRLRIHAKNLAGVGVPSKATDAILAETRPGTNEIVVDVDDNGVISLIFECSDLKEDSQFVWSKNYEAFTDSSRLTIQTTGGKSRAIFNDPSLDDLGIYSCVVTNTDGVSASYTLTEEGLKRLLDISHDHQFPIIPFKSEMAIELQEKGRVRFWAEVGKFTSNLQVEYVFNDNVIHEGKKYTMNFNKSTGIIEMFMDLLEVTDEGTFTFNLVDGKATGRTSLVLIGEEFAELQKKSEFERAEWVRRQGPHFVEYLSFEVTPECDVHLKCKVGNIKPATEIAWFKDGIEIEEDDEDAKKIGKSDEVLTFDIGKLVIKSEKAERKKKPATEESPSKPKISKKDAGVYEVKLKDERGKDKTLLNLTDAGYQAVLNEVFRVIANSSTELKVMSTEHGIILYSFVVHYLEDLRVGWLHKESKISHSDRVQCGVTGEQLWLKINEPTEKDKGKYAIDIFDGKGSVKRVLDLSGQVWEEAFEEFKRLKAAAIAERNRARVVGGLPDVVTIQEGKSLNLTGNVWGDPAPEVSWIKNEKPLVCDEHHTLKYEHSKFASITIAAVTTTDSGKYALLVKNKYGTEAAEFTVSVYIPEDEAEKKE
